(19) United States
(12) Patent Application Publication
(10) Pub. No.: US 2023/0226182 A1
(43) Pub. Date: Jul. 20, 2023

(54) CHIMERIC ANTIGEN RECEPTOR SPECIFIC FOR HLA

(71) Applicants: UCL BUSINESS LTD, London (GB); QUELL THERAPEUTICS LIMITED, London (GB)

(72) Inventors: Hans STAUSS, London (GB); Emma MORRIS, London (GB); Jenny MCGOVERN, London (GB); Elisa PETRIS, London Greater London (GB); Frederick DEAR, London Greater London (GB)

(21) Appl. No.: 17/771,191

(22) PCT Filed: Oct. 23, 2020
(86) PCT No.: PCT/GB2020/052695

§ 371 Date: Apr. 22, 2022

(30) Foreign Application Priority Data
Oct. 23, 2019 (GB) 1915384.0

(51) Int. Cl. A61K 39/00; C07K 14/47; C07K 14/725; C07K 16/28

(52) U.S. Cl. CPC A61K 39/4631; C07K 14/4703; C07K 14/7051; C07K 16/2833; A61K 39/46434; A61K 39/4611; A61K 39/4621; A61K 2239/13; A61K 2239/21; C07K 2319/03; A61K 2239/22; C07K 2319/02

(57) ABSTRACT

A vector comprising a first polynucleotide encoding a FOXP3 polypeptide and a second polynucleotide encoding a chimeric antigen receptor (CAR), wherein the CAR comprises an antigen recognition domain which specifically binds to a human leukocyte antigen (HLA), wherein the first polynucleotide and the second polynucleotide are operably linked to the same promoter, and wherein the first polynucleotide is upstream of the second polynucleotide.

### REFERENCE TO SEQUENCE LISTING

[0001] The Sequence Listing submitted Dec. 16, 2022, as a text file named “[FILE NAME],” created on Dec. 15, 2022, and having a size of [FILE SIZE] bytes is hereby incorporated by reference pursuant to 37 C.F.R. § 1.52(e)(5).

### FIELD OF THE INVENTION

[0002] The present invention relates to a vector encoding FOXP3 and a HLA-specific chimeric antigen receptor (CAR). The present invention also relates to engineered regulatory T cells comprising said vector and therapeutics uses thereof.

### BACKGROUND TO THE INVENTION

[0003] Allogeneic transplantation of foreign organs or tissues has lifesaving potential, but can lead to serious complications. After solid organ transplantation, immune-mediated rejection mandates the use of prolonged global immunosuppression and limits the life span of transplanted allografts. (Perkey, E. and Maillard, I., 2018. Annual Review of Pathology: Mechanisms of Disease, 13, pp. 219-245).

[0004] For example, acute cellular rejection occurs in 15-25% of liver transplant recipients on Tacrolimus based immunosuppression regimens (Choudhary, N. S., et al., 2017. Journal of clinical and experimental hepatology, 7(4), pp. 358-366). Acute immune-mediated rejection can be as high as 30-40% for kidney transplants (Roberts, D. M., et al., 2012. Transplantation, 94(8), pp. 775-783.),

[0005] While acute transplant rejection usually responds well to treatment, chronic rejection can represent a difficult situation. For example, a significant proportion of liver transplant patients do not respond to increased immunosuppression. Chronic rejection often leads to retransplantation or death (Choudhary, N. S., et al., 2017. Journal of clinical and experimental hepatology, 7(4), pp. 358-366).

[0006] Antigens present in the transplanted organ but not in the patient are a major cause of immune-mediated rejection. In particular, human leukocyte antigens (HLAs) present in the transplanted organ but not in the patient are an important cause of transplant rejection. HLA-A, HLA-B, and HLA-DR are major transplantation antigens and recent clinical data indicates that HLA matching also affects the clinical outcomes of HSCT. Acute rejection is primarily the result of a T cell-mediated response, whilst chronic rejection may also be due to antibody-mediated responses (Choo, S. Y., 2007. Yonsei medical journal, 48(1), pp. 11-23).

[0007] HLA typing can be used to match patients and donors for transplants and to reduce the risk of transplant rejection. HLA matching has, for example, had a large clinical impact in kidney and bone marrow transplantation. However, in heart, liver and lung transplantation allocation is based primarily on medical urgency, availability of donors, and waiting time (Sheldon, S. and Poulton, K., 2006. In Transplantation immunology, pp. 157-174, Humana Press; and Choo, S. Y., 2007. Yonsei medical journal, 48(1), pp. 11-23).

[0008] Moreover, HLA matching by Sanger Sequencing-Based Typing (SBT), the current standard of care, has important limitations. SBT typically only sequences a subset of HLA gene regions, precluding identification of potentially functional differences outside of those regions. In addition, DNA sequences generated by SBT have phase ambiguity, which affects as many as 53% of samples tested, providing a large source of potential error. HLA genotype ambiguities often require significant additional testing to ensure accurate matching of patient and potential donor (Allen, E. S., et al., 2018. Human immunology, 79(12), pp. 848-854).

[0009] Consequently, there remains a need for improved methods to down-regulate immune responses in transplant patients, in particular when there are antigens (e.g. HLAs) present in the transplanted organ but not in the patient.

### SUMMARY OF THE INVENTION

[0010] Regulatory T cells (Tregs) are a type of T cell that modulate the activity of the immune system. Generally, Tregs are immunosuppressive, down-regulating immune responses to stimuli. In particular, Tregs suppress activation and proliferation of conventional T cells, some types of which are directly involved in immune responses (e.g. cytotoxic T cells).

[0011] The suppressive effect of Tregs can be directed towards specific targets by expression of chimeric antigen receptors (CARs) that recognise antigens expressed on the surface of target cells. The present invention uses Tregs comprising CARs directed to an HLA antigen (e.g. HLA-A2) to induce tolerance to a transplant in a subject, or to treat and/or prevent transplant rejection.

[0012] However, there is a risk that engineered Tregs may lose the ability to suppress an immune response over time, which will reduce the efficacy of any Treg immunotherapy and/or require multiple infusions of the engineered Treg. There is also a risk that the engineered Tregs (i.e. Tregs expressing the CAR) may acquire an effector phenotype over time. Moreover, there is the potential to generate an engineered T effector cell as a by-product of generating of engineered Tregs, if, for example, T effector cells are present in the starting cell population.

[0013] This is problematic as, contrary to the immunosuppressive effect of Tregs, engineered T effector cells may increase or encourage immune-mediated damage of the target cells.

[0014] It has surprisingly been found that exogenous FOXP3 expression in regulatory T cells (Tregs) (which already express endogenous FOXP3) may enhance their regulatory function.

[0015] It has also surprisingly been found that exogenous FOXP3 expression in Tregs (which already express endogenous FOXP3) may reduce the risk of a Treg acquiring an effector phenotype and reduces the risk of generating an engineered T effector cell during generation of engineered Tregs.

[0016] Moreover, the inventors have determined that a configuration in which the polynucleotide encoding FOXP3 precedes that encoding the CAR in the 5′ to 3′ direction ensures that CAR expression can only occur when FOXP3 has been expressed and that expression of CAR without FOXP3 does not occur. This is a particular advantage in the present context of an engineered Treg, as it greatly reduces the risk of an engineered Treg acquiring an effector phenotype and/or reduces the risk associated with introducing the CAR into a T effector cell present in a starting population.

[0017] Accordingly, the present invention provides HLA-specific Tregs with enhanced efficacy and safety. The Tregs may be used for inducing tolerance to a transplant in a subject or for the treatment and/or prevention of transplant rejection.

[0018] In a first aspect, the present invention provides a vector comprising a first polynucleotide encoding a FOXP3 polypeptide and a second polynucleotide encoding a chimeric antigen receptor (CAR), wherein the CAR comprises an antigen recognition domain which specifically binds to a human leukocyte antigen (HLA), wherein the first polynucleotide and the second polynucleotide are operably linked to the same promoter, and wherein the first polynucleotide is upstream of the second polynucleotide.

[0019] Preferably, the antigen recognition domain specifically binds to HLA-A2.

[0020] The vector may comprise a polynucleotide encoding a cleavage site between the first polynucleotide and the second polynucleotide and/or an internal ribosome entry site (IRES) between the first polynucleotide and the second polynucleotide. Suitably, the vector may comprise a self-cleaving sequence between the first polynucleotide and the second polynucleotide, preferably wherein the self-cleaving sequence is a polynucleotide sequence encoding a 2A self-cleaving peptide. The 2A self-cleaving peptide may be selected from the group consisting of: P2A peptide, T2A peptide, E2A peptide, and F2A peptide.

[0021] The antigen recognition domain may be an antibody, an antibody fragment, or derived from an antibody. Suitably, the antigen recognition domain may be an antigen-binding fragment (Fab), a single chain antibody (scFv), or a single-domain antibody (sdAb). Preferably, the antigen recognition domain is a single chain antibody (scFv).

[0022] The CAR comprises a transmembrane (TM) domain and an intracellular signalling domain. The CAR may also comprise a hinge domain and/or one or more co-stimulatory domains. Preferably, the CAR comprises a CD8 hinge domain, a CD8 TM domain, a CD28 signalling domain, and a CD3 zeta signalling domain.

[0023] The vector may be a viral vector, preferably a retroviral vector or a lentiviral vector.

[0024] In another aspect the present invention provides an engineered T cell comprising a vector according to the present invention.

[0025] In another aspect the present invention provides an engineered regulatory T cell (Treg) comprising a vector according to the present invention.

[0026] In another aspect the present invention provides a polynucleotide encoding a FOXP3 polypeptide or a vector according to the present invention, for use in enhancing the ability of an engineered HLA-specific Treg to suppress an immune response, preferably an immune response against a cell expressing HLA.

[0027] The present invention also provides a method for enhancing the ability of an engineered HLA-specific Treg to suppress an immune response comprising introducing a polynucleotide encoding a FOXP3 polypeptide as described herein, or introducing a vector according to the present invention, into the Treg. Preferably the immune response is against a cell expressing the HLA.

[0028] The present invention also provides the use of a polynucleotide encoding a FOXP3 polypeptide as described herein, or the use of a vector as described herein, for enhancing the ability of an engineered HLA-specific Treg to suppress an immune response comprising introducing the polynucleotide encoding a FOXP3 polypeptide, or introducing the vector, into the Treg. Preferably the immune response is against a cell expressing the HLA.

[0029] In another related aspect the present invention provides a method for enhancing the ability of an engineered HLA-specific Treg to suppress an immune response comprising introducing a first polynucleotide encoding a FOXP3 polypeptide and a second polynucleotide encoding a HLA-specific CAR into the Treg.

[0030] In another related aspect the present invention provides a method for enhancing the ability of an engineered HLA-specific Treg to suppress an immune response comprising introducing a first polynucleotide encoding a FOXP3 polypeptide and a second polynucleotide encoding a HLA-specific CAR into a cell-containing sample, wherein:
[0031] (a) the cell-containing sample comprises or consists of Tregs; and/or
[0032] (b) the cell-containing sample comprises or consists of peripheral blood mononuclear cells (PBMCs) and Tregs are enriched from the cell-containing sample prior to or after introducing the first polynucleotide and/or second polynucleotide; and/or
[0033] (c) the cell-containing sample comprises or consists of PBMCs and Tregs are generated from the cell-containing sample prior to or after introducing the first polynucleotide and/or the second polynucleotide; and/or
[0034] (d) the cell-containing sample comprises or consists of pluripotent stem cells (PSCs) (e.g. induced pluripotent stem cells (iPSCs) or human embryonic stem cells (hESCs)) and Tregs are differentiated from the PSCs prior to or after introducing the first polynucleotide and/or the second polynucleotide.

[0035] Preferably the cell-containing sample has been isolated from the body.

[0036] In another aspect the present invention provides a polynucleotide encoding a FOXP3 polypeptide or a vector according to the present invention for use in reducing the risk of an engineered HLA-specific Treg acquiring an effector phenotype.

[0037] The present invention also provides a method for reducing the risk of an engineered HLA-specific Treg acquiring an effector phenotype comprising introducing a polynucleotide encoding a FOXP3 polypeptide, or introducing a vector according to the present invention, into the Treg.

[0038] The present invention also provides use of a polynucleotide encoding a FOXP3 polypeptide, or use of a vector as described herein, for reducing the risk of an engineered HLA-specific Treg acquiring an effector phenotype comprising introducing the polynucleotide encoding a FOXP3 polypeptide, or introducing the vector, into the Treg.

[0039] In another related aspect the present invention provides a method for reducing the risk of an engineered HLA-specific Treg acquiring an effector phenotype comprising introducing a first polynucleotide encoding a FOXP3 polypeptide and a second polynucleotide encoding a HLA-specific CAR into the Treg.

[0040] In another related aspect the present invention provides a method for reducing the risk of an engineered HLA-specific Treg acquiring an effector phenotype comprising introducing a first polynucleotide encoding a FOXP3 polypeptide and a second polynucleotide encoding a HLA-specific CAR into a cell-containing sample, wherein:
[0041] (a) the cell-containing sample comprises or consists of Tregs; and/or
[0042] (b) the cell-containing sample comprises or consists of PBMCs and Tregs are enriched from the cell-containing sample prior to or after introducing the first polynucleotide and/or the second polynucleotide; and/or
[0043] (c) the cell-containing sample comprises or consists of PBMCs and Tregs are generated from the cell-containing sample prior to or after introducing the first polynucleotide and/or the second polynucleotide; and/or
[0044] (d) the cell-containing sample comprises or consists of pluripotent stem cells (PSCs) (e.g. induced pluripotent stem cells (iPSCs) or human embryonic stem cells (hESCs)) and Tregs are differentiated from the PSCs prior to or after introducing the first polynucleotide and/or the second polynucleotide.

[0045] Preferably the cell-containing sample has been isolated from the body.

[0046] In another aspect the present invention provides a FOXP3 polypeptide or a vector according to the present invention for use in reducing the risk of generating an engineered HLA-specific T effector cell during generation of engineered HLA-specific Tregs.

[0047] The present invention also provides a method for reducing the risk of generating an engineered HLA-specific T effector cell during generation of engineered HLA-specific Tregs comprising introducing a polynucleotide encoding a FOXP3 polypeptide as described herein, or introducing a vector as described herein, into the Treg.

[0048] The present invention also provides use of a polynucleotide encoding a FOXP3 polypeptide as described herein, or use of a vector as described herein, for reducing the risk of generating an engineered HLA-specific T effector cell during generation of engineered HLA-specific Tregs comprising introducing the polynucleotide encoding the FOXP3 polypeptide, or introducing the vector, into the Treg.

[0049] In another related aspect the present invention provides a method for reducing the risk of generating an engineered HLA-specific T effector cell during generation of engineered HLA-specific Tregs, comprising introducing a first polynucleotide encoding a FOXP3 polypeptide and a second polynucleotide encoding a HLA-specific CAR into the Treg.

[0050] In another related aspect the present invention provides a method for reducing the risk of generating an engineered HLA-specific T effector cell during generation of engineered HLA-specific Tregs, comprising introducing a first polynucleotide encoding a FOXP3 polypeptide and a second polynucleotide encoding a HLA-specific CAR into a cell-containing sample, wherein:
[0051] (a) the cell-containing sample comprises Tregs and/or T effector cells; and/or
[0052] (b) the cell-containing sample comprises or consists of PBMCs and Tregs are enriched from the cell-containing sample prior to or after introducing the first polynucleotide and/or the second polynucleotide; and/or
[0053] (c) the cell-containing sample comprises or consists of PBMCs and Tregs are generated from the cell-containing sample prior to or after introducing the first polynucleotide and/or the second polynucleotide; and/or
[0054] (d) the cell-containing sample comprises or consists of pluripotent stem cells (PSCs) (e.g. induced pluripotent stem cells (iPSCs) or human embryonic stem cells (hESCs) and Tregs are differentiated from the PSCs prior to or after introducing the first polynucleotide and/or the second polynucleotide.

[0055] Preferably the cell-containing sample has been isolated from the body.

[0056] According to the present invention, the HLA referred to herein is preferably HLA-A2, e.g. preferably the HLA-specific CAR is a HLA-A2-specific CAR, the engineered HLA-specific Tregs are engineered HLA-A2-specific Tregs, and the engineered HLA-specific T effector cells are engineered HLA-A2-specific T effector cells.

[0057] In these aspects, the first polynucleotide and/or the second polynucleotide may be introduced by viral transduction, for example retroviral or lentiviral transduction. Preferably, the first polynucleotide and the second polynucleotide are introduced in a single vector, optionally wherein the first polynucleotide and the second polynucleotide are operably linked to the same promoter. More preferably, the single vector is a vector according to the present invention.

[0058] In another aspect the present invention provides an engineered Treg obtainable or obtained by a method according to the present invention.

[0059] In another aspect the present invention provides a pharmaceutical composition comprising a vector, an engineered T cell or an engineered Treg according to the present invention.

[0060] In another aspect the present invention provides a vector, an engineered T cell or Treg, or a pharmaceutical composition according to the present invention for use in induction of tolerance to a transplant in a subject, or for use in treatment and/or prevention of transplant rejection or graft-versus-host disease (GvHD) in a subject, or for use in treatment and/or prevention of an autoimmune or allergic disease in a subject, or for use in promoting tissue repair and/or tissue regeneration in a subject, or for use in ameliorating chronic inflammation in a subject. Preferably the subject is human.

[0061] In another related aspect the present invention provides a method of inducing tolerance to a transplant in a subject, or treating and/or preventing transplant rejection or GvHD in a subject, comprising administering a vector, an engineered T cell or Treg, or a pharmaceutical composition according to the present invention to the subject. Preferably the subject is human.

[0062] The method may comprise the following steps:
[0063] (i) isolation or provision of a cell-containing sample (e.g. from the subject), wherein the cell-containing sample comprises or consists of PBMCs; and
[0064] (ii) introducing a vector according to the invention into the cell-containing sample;
   wherein the cell-containing sample comprises or consists of Tregs; and/or wherein Tregs are enriched from the cell-containing sample prior to or after introducing the vector; and/or wherein Tregs are generated from the cell-containing sample prior to or after introducing the vector; and/or the cell-containing sample comprises or consists of pluripotent stem cells (PSCs) (e.g. induced pluripotent stem cells (iPSCs) or human embryonic stem cells (hESCs) and Tregs are differentiated from the PSCs prior to or after introducing the vector.

### DESCRIPTION OF DRAWINGS

[0065] FIG. 1—the proliferation of Tconv cells (donor 1)

[0066] FIG. 1 shows the proliferation of Tconv cells transduced with a TCR construct, with and without peptide (shown with “*”), and the proliferation of the same cells in the presence of mock-transduced Tregs (white bars), Tregs transduced with a TCR construct (black bars) or Tregs transduced with a TCR construct and FOXP3 (grey bars) at different Treg:Tconv ratios.

[0067] FIG. 2—IL-2 production of Tconv cells (donor 1)

[0068] FIG. 2 shows the IL-2 production of Tconv cells transduced with a TCR construct, with and without peptide (shown with “*”), and the IL-2 production of the same cells in the presence of mock-transduced Tregs (white bars), Tregs transduced with a TCR construct (black bars) or Tregs transduced with a TCR construct and FOXP3 (grey bars) at different Treg:Tconv ratios.

[0069] FIG. 3—proliferation of Tconv cells (donor 2)

[0070] FIG. 3 shows the proliferation of Tconv cells (from a different donor to FIG. 1) transduced with a TCR construct, with and without peptide (shown with “*”), and the proliferation of the same cells in the presence of mock-transduced Tregs (white bars), Tregs transduced with a TCR construct (black bars) or Tregs transduced with a TCR construct and FOXP3 (grey bars) at different Treg:Tconv ratios.

[0071] FIG. 4—IL-2 production of Tconv cells (donor 2)

[0072] FIG. 4 shows the IL-2 production of Tconv cells (from a different donor to FIG. 2) transduced with a TCR construct with and without peptide (shown with “*”) and the proliferation of the same cells in the presence of mock-transduced Tregs (white bars), Tregs transduced with a TCR construct (black bars) or Tregs transduced with a TCR construct and FOXP3 (grey bars) at different Treg:Tconv ratios.

[0073] FIG. 5—mean fluorescence intensity (MFI) of Treg markers

[0074] FIG. 5 shows the mean fluorescence intensity (MFI) of Treg markers (FOXP3, CD25 and CTLA-4) in mock-transduced Treg or Treg transduced with TCR or TCR+FOXP3 analysed by flow cytometry at d7-10 after transduction. Dots are representative of individual experiments. 1-way ANOVA was used for statistical analysis p<0.05*, p<0.005**.

[0075] FIG. 6—MFI of FOXP3, CD25 and CTLA-4 in transduced Tregs

[0076] FIG. 6 shows the MFI of FOXP3, CD25 and CTLA-4 in transduced Tregs. Each line represents a single experiment showing MFI of markers on the same Treg transduced with TCR or TCR+FOXP3.

[0077] FIG. 7—proliferation of Tconv cells (donor 3)

[0078] FIG. 7 shows the proliferation of Tconv cells (from a different donor to FIGS. 1 and 3) transduced with a TCR construct, with and without peptide, and the proliferation of the same cells in the presence of mock-transduced Tregs (white bars), Tregs transduced with a TCR construct (black bars), Tregs transduced with a TCR construct and FOXP3 (grey bars) or Tconv cells transduced with a TCR construct and FOXP3, i.e. induced Tregs (red bars, right-hand bar of each data set), at different Treg:Tconv ratios.

[0079] FIG. 8—IL-2 production by Tconv cells (donor 3)

[0080] FIG. 8 shows the level of IL-2 production by Tconv cells (from the same donor as FIG. 7) transduced with a TCR construct, with and without peptide, and IL-2 production by the same cells in the presence of mock-transduced Tregs (white bars), Tregs transduced with a TCR construct (black bars), Tregs transduced with a TCR construct and FOXP3 (grey bars) or Tconv transduced with a TCR construct and FOXP3, i.e. induced Tregs (red bars right-hand bar of each data set), at different Treg:Tconv ratios.

[0081] FIG. 9—TCR transduced regulatory T cells can engraft into irradiated hosts but require exogenous FOXP3 expression to prevent accumulation of TCR+FOXP3− cells.

[0082] Thy1.1+CD4+CD25+Treg were isolated from lymph nodes and splenocytes of HLA-DRB*0401 transgenic mice by bead sort. Treg were transduced TCR, TCR+murine FOXP3 or cultured with virus-free supernatant (mock). 1 day after transduction TCR or TCR+FOXP3 transduced cells were injected into HLA-DRB*0401 transgenic hosts conditioned with 4Gy irradiation. 7 weeks later flow cytometry was used to determine the engraftment of transduced Treg A. Transduction efficiency was determined through expression of human variable 2.1 and murine Foxp3 on dl post-transduction B. Splenocytes from mice that received Treg transduced with TCR or TCR+FOXP3 were stained with Thy1.1 to identify transferred cells (top panel) and FOXP3 and TCR (bottom panel) C. Cumulative data showing fold change in transduction efficiency (left panel) and fold change in absolute number of transduced cells (right panel) relative to day of injection for Treg transduced with TCR or TCR+FOXP3 (n=3). Error bars show standard error of the mean. Statistical analysis by unpaired t test D. Representative expression of FOXP3 within transduced cells 7 weeks after transfer. Graphs show cumulative of percentage FOXP3+ cells within the transduced population at week 7 (left) and the fold change in FOXP3+ cells relative to the day of injection (n=3). Error bars show standard error of the mean. *p=>0.05, **p=>0.01 determined by unpaired t test.

[0083] FIG. 10—Treg expressing exogenous FOXP3 retain Treg functionality after 7 weeks in vivo whilst Tregs not expressing exogenous FOXP3 acquire the ability to produce effector cytokines

[0084] A Splenocytes were cultured for 4 hours with CD86+HLA-DR4+CHO cells pulsed with irrelevant peptide or 10 uM MBP. Production of IL-2 and IFNg was determined by flow cytometry. FACS plots show CD45.1 cells (top panel) containing Treg expressing TCR alone and Thy1.1 cells containing Treg expressing TCR+FOXP3. B Graphs show cumulative IL-2 and IFNg production by TCR-expressing (dark grey) and TCR+FOXP3-expressing (light grey) Treg. Error bars show standard deviation of the mean (n=3).

[0085] FIG. 11A—Illustrative HLA-A2-specific CAR construct designs

[0086] Schematic diagram of an illustrative vectors encoding a HLA-A2-specific CAR (denoted as A2 CAR): Construct F-C: illustrates a construct encoding 5′-FOXP3-P2A-A2 CAR-3′; Construct R-C: illustrates a construct encoding 5′-R-P2A-A2 CAR-3′, where R is another gene; Construct C: illustrates a construct encoding the A2 CAR only; Construct C-R: illustrates a construct encoding 5′-A2 CAR-P2A-R-3′, where R is another gene.

[0087] FIG. 11B—Generation of FOXP3/HLA-A2 CAR-Tregs

[0088] Schematic illustration showing the generation and expansion of the FOXP3/HLA-A2 CAR-Tregs. Phoenix-GP (P.gp) cells, a retroviral packaging line stably expressing gag pol, were seeded at 1×10⁶ cells/10 mm cell culture dish. The next day CD4+CD25hiCD127^{low} cells were isolated and activated with anti-CD3/CD28 beads in the absence of IL-2. On the same day P.gp cells were transfected with envelope and constructs encoding FOXP3/HLA.A2-CAR using Fugene transfection reagent. Two days after activation Tregs were transduced with g-retrovirus containing and supplemented with IL-2. Every 2 days cells were supplemented with additional media and IL-2. HLA.A2 dextramers were used to assess transduction efficacy at day 6. Tregs were further expanded with fresh anti-CD3/CD28 beads.

[0089] FIG. 12—HLA-A2-specific CAR and FOXP3 expression in transduced Tregs

[0090] FIG. 12 shows the HLA-A2-specific CAR (A2 CAR) expression levels, FOXP3 expression levels and the expression levels of another gene, R, in Tregs transduced with Construct F-C, Construct R-C, Construct C, and Construct C-R, compared to mock control Tregs, as determined by flow cytometry.

[0091] FIG. 12A shows CD3+CD4+ gated FACS plots for Dextramer (HLA) against SSC-A for the mock Tregs and for Tregs transduced with Construct F-C, Construct R-C, Construct C, and Construct C-R. Tregs transduced with each construct expressed the HLA-A2-specific CAR.

[0092] FIG. 12B shows CD3+CD4+Dextramer+ gated FACS plots for expression of FOXP3 against expression of another gene, R, for the mock Tregs and for Tregs transduced with Construct F-C, Construct R-C, Construct C, and Construct C-R. The gene, R, was expressed in high levels in Tregs transduced with both Construct R-C and Construct C-R. FOXP3 was expressed in all Tregs, but was noticeably higher in Construct F-C, particularly when compared to expression of the HLA-A2-specific CAR alone (Construct C).

[0093] FIG. 13—HLA-A2-specific CAR and FOXP3 expression in transduced and expanded Tregs

[0094] FIG. 13 shows the HLA-A2-specific CAR (A2 CAR) expression levels, FOXP3 expression levels and the expression levels of another gene, R, in expanded Tregs transduced with Construct F-C, Construct R-C, Construct C, and Construct C-R, compared to mock control Tregs, as determined by flow cytometry.

[0095] FIG. 13A shows CD3+CD4+ gated FACS plots for Dextramer (HLA) against SSC-A for the mock expanded Tregs and for Tregs transduced with Construct F-C, Construct R-C, Construct C, and Construct C-R and subsequently expanded. Tregs transduced with each construct still expressed the HLA-A2-specific CAR after expansion.

[0096] FIG. 13B shows CD3+CD4+Dextramer+ gated FACS plots for expression of FOXP3 against expression of another gene, R, for the mock expanded Tregs and for Tregs transduced with Construct F-C, Construct R-C, Construct C, and Construct C-R and subsequently expanded. FOXP3 expression decreased in Tregs transduced with Construct R-C, Construct C, and Construct C-R after expansion. In contrast, FOXP3 expression did not decrease in Tregs transduced Construct F-C after expansion. Consequently, FOXP3 expression was substantially higher in Construct F-C after expansion, particularly when compared to expression of the HLA-A2-specific CAR alone (Construct C).

[0097] FIG. 14—Phenotypic lineage of Tregs transduced with a construct encoding FOXP3 and an HLA-A2 specific CAR

[0098] FIG. 14 shows phenotypic lineage marker expression in Tregs transduced with Construct F-C, Construct R-C, Construct C, and Construct C-R.

[0099] Tregs transduced with construct F-C maintain Treg phenotypic lineage while enhancing FOXP3 expression.

### DETAILED DESCRIPTION

[0100] The suppressive properties of Tregs can be exploited therapeutically to improve and/or prevent immune-mediated organ damage in transplantation. The suppressive effect of Tregs can be directed towards specific targets by expression of chimeric antigen receptors (CARs) that recognise antigens expressed on the surface of target cells. In transplant rejection the CARs may be directed to an HLA antigen (e.g. HLA-A2) that is present in the graft (transplant) donor but not in the graft (transplant) recipient, whilst in GvHD the CARs may be directed to an HLA antigen (e.g. HLA-A2) that is present in the recipient but not in the graft (transplant) donor.

[0101] The present inventors have surprisingly found that exogenous FOXP3 expression in regulatory T cells (Tregs) (which already express endogenous FOXP3) may enhance their regulatory function.

[0102] The present inventors have surprisingly found that exogenous FOXP3 expression in Tregs (which already express endogenous FOXP3) may reduce the risk of a Treg acquiring an effector phenotype and reduces the risk of generating an engineered T effector cell during generation of engineered Tregs. In particular, a configuration in which FOXP3 precedes the CAR in the 5′ to 3′ direction ensures that CAR expression can only occur when FOXP3 has been expressed and that expression of CAR without FOXP3 does not occur.

[0103] Accordingly, the present invention provides HLA-specific Tregs (particularly HLA-A2-specific Tregs) with enhanced efficacy and safety. The Tregs may be used for the treatment and/or prevention of transplant rejection or graft-versus-host disease.

[0104] Various preferred features and embodiments of the present invention will now be described by way of non-limiting examples.

[0105] It must be noted that as used herein and in the appended claims, the singular forms “a”, “an”, and “the” include plural referents unless the context clearly dictates otherwise.

[0106] The terms “comprising”, “comprises” and “comprised of” as used herein are synonymous with “including”, “includes” or “containing”, “contains”, and are inclusive or open-ended and do not exclude additional, non-recited members, elements or method steps. The terms “comprising”, “comprises” and “comprised of” also include the term “consisting of”.

[0107] The publications discussed herein are provided solely for their disclosure prior to the filing date of the present application. Nothing herein is to be construed as an admission that such publications constitute prior art to the claims appended hereto.

[0108] This disclosure is not limited by the exemplary methods and materials disclosed herein, and any methods and materials similar or equivalent to those described herein can be used in the practice or testing of embodiments of this disclosure. Numeric ranges are inclusive of the numbers defining the range. Unless otherwise indicated, any nucleic acid sequences are written left to right in 5′ to 3′ orientation; amino acid sequences are written left to right in amino to carboxy orientation, respectively.

[0109] Forkhead Box P3 Protein (FOXP3)

[0110] In the present invention, FOXP3 expression is increased in cells (e.g. Tregs) by introducing into the cells a polynucleotide (sometimes referred to herein as a first polynucleotide) encoding a FOXP3 polypeptide.

[0111] “FOXP3” is the abbreviated name of the forkhead box P3 protein. FOXP3 is a member of the FOX protein family of transcription factors and functions as a master regulator of the regulatory pathway in the development and function of regulatory T cells.

[0112] “Increasing FOXP3 expression” means to increase the levels of FOXP3 mRNA and/or protein in a cell (or population of cells) in comparison to a corresponding cell which has not been modified (or population of cells). For example, the level of FOXP3 mRNA and/or protein in a cell modified according to the present invention (or a population of such cells) may be increased to at least 1.5-fold, at least 2-fold, at least 5-fold, at least 10-fold, at least 50-fold, at least 100-fold, at least 150-fold greater than the level in a corresponding cell which has not been modified according to the present invention (or population of such cells). Preferably the cell is a Treg or the population of cells is a population of Tregs.

[0113] Suitably, the level of FOXP3 mRNA and/or protein in a cell modified by according to the present invention (or a population of such cells) may be increased to at least 1.5-fold greater, 2-fold greater, or 5-fold greater than the level in a corresponding cell which has not been modified according to the present invention (or population of such cells). Preferably the cell is a Treg or the population of cells is a population of Tregs.

[0114] Techniques for measuring the levels of specific mRNA and protein are well known in the art. mRNA levels in a population of cells, such as Tregs, may be measured by techniques such as the Affymetrix ebioscience prime flow RNA assay, Northern blotting, serial analysis of gene expression (SAGE) or quantitative polymerase chain reaction (qPCR). Protein levels in a population of cells may be measured by techniques such as flow cytometry, high-performance liquid chromatography (HPLC), liquid chromatography-mass spectrometry (LC/MS), Western blotting or enzyme-linked immunosorbent assay (ELISA).

[0115] A “FOXP3 polypeptide” is a polypeptide having FOXP3 activity i.e. a polypeptide able to bind FOXP3 target DNA and function as a transcription factor regulating development and function of Tregs. Particularly, a FOXP3 polypeptide may have the same or similar activity to wildtype FOXP3 (SEQ ID NO.1), e.g. may have at least 40, 50, 60, 70, 80, 90, 95, 100, 110, 120, 130, 140 or 150% of the activity of the wildtype FOXP3 polypeptide. Techniques for measuring transcription factor activity are well known in the art. For example, transcription factor DNA-binding activity may be measured by ChIP. The transcription regulatory activity of a transcription factor may be measured by quantifying the level of expression of genes which it regulates. Gene expression may be quantified by measuring the levels of mRNA and/or protein produced from the gene using techniques such as Northern blotting, SAGE, qPCR, HPLC, LC/MS, Western blotting or ELISA. Genes regulated by FOXP3 include cytokines such as IL-2, IL-4 and IFN-γ (Siegler et al. Annu. Rev. Immunol. 2006, 24: 209-26, incorporated herein by reference).

[0116] A “functional fragment of FOXP3” may refer to a portion or region of a FOXP3 polypeptide or a polynucleotide encoding a FOXP3 polypeptide that has the same of similar activity to the full-length FOXP3 polypeptide or polynucleotide. The functional fragment may have at least 40%, at least 50%, at least 60%, at least 70%, at least 80%, at least 90%, at least 95%, or 100% of the activity of the full-length FOXP3 polypeptide or polynucleotide. A person skilled in the art would be able to generate functional fragments based on the known structural and functional features of FOXP3. These are described, for instance, in Song, X., et al., 2012. Cell reports, 1(6), pp. 665-675; Lopes, J. E., et al., 2006. The Journal of Immunology, 177(5), pp. 3133-3142; and Lozano, T., et al, 2013. Frontiers in oncology, 3, p. 294.

[0117] A “FOXP3 variant” may include an amino acid sequence or a nucleotide sequence which may be at least 50%, at least 55%, at least 65%, at least 70%, at least 75%, at least 80%, at least 85% or at least 90% identical, preferably at least 95% or at least 97% or at least 99% identical to a FOXP3 polypeptide or a polynucleotide encoding a FOXP3 polypeptide. FOXP3 variants may have the same or similar activity to a wildtype FOXP3 polypeptide or polynucleotide, e.g. may have at least 40, 50, 60, 70, 80, 90, 95, 100, 110, 120, 130, 140 or 150% of the activity of a wildtype FOXP3 polypeptide or polynucleotide. A person skilled in the art would be able to generate FOXP3 variants based on the known structural and functional features of FOXP3 and/or using conservative substitutions.

[0118] FOXP3 Polypeptide Sequences

[0119] Suitably, the FOXP3 polypeptide may comprise the polypeptide sequence of a human FOXP3, such as UniProtKB accession Q9BZS1 (SEQ ID NO: 1), or a functional fragment thereof:

FOXP3, UniProtKB accession Q9BZS1 (SEQ ID NO: 1):
MPNPRPGKPSAPSLALGPSPGASPSWRAAPKASDLLGARGPGGTFQGRDL
RGGAHASSSSLNPMPPSQLQLPTLPLVMVAPSGARLGPLPHLQALLQDRP
HFMHQLSTVDAHARTPVLQVHPLESPAMISLTPPTTATGVFSLKARPGLP
PGINVASLEWVSREPALLCTFPNPSAPRKDSTLSAVPQSSYPLLANGVCK
WPGCEKVFEEPEDFLKHCQADHLLDEKGRAQCLLQREMVQSLEQQLVLEK
EKLSAMQAHLAGKMALTKASSVASSDKGSCCIVAAGSQGPVVPAWSGPRE
APDSLFAVRRHLWGSHGNSTFPEFLHNMDYFKFHNMRPPFTYATLIRWAI
LEAPEKQRTLNEIYHWFTRMFAFFRNHPATWKNAIRHNLSLHKCFVRVES
EKGAVWTVDELEFRKKRSQRPSRCSNPTPGP

[0120] In some embodiments of the invention, the FOXP3 polypeptide comprises an amino acid sequence which is at least 70% identical to SEQ ID NO: 1 or a functional fragment thereof. Suitably, the FOXP3 polypeptide comprises an amino acid sequence which is at least 80%, at least 85%, at least 90%, at least 95%, at least 98% or at least 99% identical to SEQ ID NO: 1 or a functional fragment thereof. In some embodiments, the FOXP3 polypeptide comprises or consists of SEQ ID NO: 1 or a functional fragment thereof.

[0121] Suitably, the FOXP3 polypeptide may be a variant of SEQ ID NO: 1, for example a natural variant. Suitably, the FOXP3 polypeptide is an isoform of SEQ ID NO: 1. For example, the FOXP3 polypeptide may comprise a deletion of amino acid positions 72-106 relative to SEQ ID NO: 1. Alternatively, the FOXP3 polypeptide may comprise a deletion of amino acid positions 246-272 relative to SEQ ID NO: 1.

[0122] Suitably, the FOXP3 polypeptide comprises SEQ ID NO: 2 or a functional fragment thereof:

Illustrative FOXP3 polypeptide (SEQ ID NO: 2):
MPNPRPGKPSAPSLALGPSPGASPSWRAAPKASDLLGARGPGGTFQGRDL
RGGAHASSSSLNPMPPSQLQLPTLPLVMVAPSGARLGPLPHLQALLQDRP
HFMHQLSTVDAHARTPVLQVHPLESPAMISLTPPTTATGVFSLKARPGLP
PGINVASLEWVSREPALLCTFPNPSAPRKDSTLSAVPQSSYPLLANGVCK
WPGCEKVFEEPEDFLKHCQADHLLDEKGRAQCLLQREMVQSLEQVEELSA
MQAHLAGKMALTKASSVASSDKGSCCIVAAGSQGPVVPAWSGPREAPDSL
FAVRRHLWGSHGNSTFPEFLHNMDYFKFHNMRPPFTYATLIRWAILEAPE
KQRTLNEIYHWFTRMFAFFRNHPATWKNAIRHNLSLHKCFVRVESEKGAV
WTVDELEFRKKRSQRPSRCSNPTPGPEGRGSLLTCGDVEEN

[0123] Suitably the FOXP3 polypeptide comprises an amino acid sequence which is at least 70% identical to SEQ ID NO: 2 or a functional fragment thereof. Suitably, the FOXP3 polypeptide comprises an amino acid sequence which is at least 80%, at least 85%, at least 90%, at least 95%, at least 98% or at least 99% identical to SEQ ID NO: 2 or a functional fragment thereof. In some embodiments, the FOXP3 polypeptide comprises or consists of SEQ ID NO: 2 or a functional fragment thereof.

[0124] Suitably, the FOXP3 polypeptide may be a variant of SEQ ID NO: 2, for example a natural variant. Suitably, the FOXP3 polypeptide is an isoform of SEQ ID NO: 2 or a functional fragment thereof. For example, the FOXP3 polypeptide may comprise a deletion of amino acid positions 72-106 relative to SEQ ID NO: 2. Alternatively, the FOXP3 polypeptide may comprise a deletion of amino acid positions 246-272 relative to SEQ ID NO: 2.

[0125] FOXP3 Polynucleotide Sequences

[0126] Suitably, the polynucleotide encoding a FOXP3 polypeptide comprises or consists of a polynucleotide sequence set forth in SEQ ID NO: 3:

Illustrative FOXP3 polynucleotide (SEQ ID NO: 3):
ATGCCCAACCCCAGGCCTGGCAAGCCCTCGGCCCCTTCCTTGGCCCTTGG
CCCATCCCCAGGAGCCTCGCCCAGCTGGAGGGCTGCACCCAAAGCCTCAG
ACCTGCTGGGGGCCCGGGGCCCAGGGGGAACCTTCCAGGGCCGAGATCTT
CGAGGCGGGGCCCATGCCTCCTCTTCTTCCTTGAACCCCATGCCACCATC
GCAGCTGCAGCTGCCCACACTGCCCCTAGTCATGGTGGCACCCTCCGGGG
CACGGCTGGGCCCCTTGCCCCACTTACAGGCACTCCTCCAGGACAGGCCA
CATTTCATGCACCAGCTCTCAACGGTGGATGCCCACGCCCGGACCCCTGT
GCTGCAGGTGCACCCCCTGGAGAGCCCAGCCATGATCAGCCTCACACCAC
CCACCACCGCCACTGGGGTCTTCTCCCTCAAGGCCCGGCCTGGCCTCCCA
CCTGGGATCAACGTGGCCAGCCTGGAATGGGTGTCCAGGGAGCCGGCACT
GCTCTGCACCTTCCCAAATCCCAGTGCACCCAGGAAGGACAGCACCCTTT
CGGCTGTGCCCCAGAGCTCCTACCCACTGCTGGCAAATGGTGTCTGCAAG
TGGCCCGGATGTGAGAAGGTCTTCGAAGAGCCAGAGGACTTCCTCAAGCA
CTGCCAGGCGGACCATCTTCTGGATGAGAAGGGCAGGGCACAATGTCTCC
TCCAGAGAGAGATGGTACAGTCTCTGGAGCAGCAGCTGGTGCTGGAGAAG
GAGAAGCTGAGTGCCATGCAGGCCCACCTGGCTGGGAAAATGGCACTGAC
CAAGGCTTCATCTGTGGCATCATCCGACAAGGGCTCCTGCTGCATCGTAG
CTGCTGGCAGCCAAGGCCCTGTCGTCCCAGCCTGGTCTGGCCCCCGGGAG
GCCCCTGACAGCCTGTTTGCTGTCCGGAGGCACCTGTGGGGTAGCCATGG
AAACAGCACATTCCCAGAGTTCCTCCACAACATGGACTACTTCAAGTTCC
ACAACATGCGACCCCCTTTCACCTACGCCACGCTCATCCGCTGGGCCATC
CTGGAGGCTCCAGAGAAGCAGCGGACACTCAATGAGATCTACCACTGGTT
CACACGCATGTTTGCCTTCTTCAGAAACCATCCTGCCACCTGGAAGAACG
CCATCCGCCACAACCTGAGTCTGCACAAGTGCTTTGTGCGGGTGGAGAGC
GAGAAGGGGGCTGTGTGGACCGTGGATGAGCTGGAGTTCCGCAAGAAACG
GAGCCAGAGGCCCAGCAGGTGTTCCAACCCTACACCTGGCCCCTGA

[0127] In some embodiments of the invention, the polynucleotide encoding the FOXP3 polypeptide or variant comprises a polynucleotide sequence which is at least 70% identical to SEQ ID NO: 3 or a functional fragment thereof. Suitably, the polynucleotide encoding the FOXP3 polypeptide or variant comprises a polynucleotide sequence which is at least 80%, at least 85%, at least 90%, at least 95%, at least 98% or at least 99% identical to SEQ ID NO: 3 or a functional fragment thereof. In some embodiments of the invention, the polynucleotide encoding the FOXP3 polypeptide or variant comprises or consists of SEQ ID NO: 3 or a functional fragment thereof.

[0128] Suitably, the polynucleotide encoding a FOXP3 polypeptide comprises or consists of a polynucleotide sequence set forth in SEQ ID NO: 4:

Illustrative FOXP3 polynucleotide (SEQ ID NO: 4):
GAATTCGTCGACATGCCCAACCCCAGACCCGGCAAGCCTTCTGCCCCTTC
TCTGGCCCTGGGACCATCTCCTGGCGCCTCCCCATCTTGGAGAGCCGCCC
CTAAAGCCAGCGATCTGCTGGGAGCTAGAGGCCCTGGCGGCACATTCCAG
GGCAGAGATCTGAGAGGCGGAGCCCACGCCTCTAGCAGCAGCCTGAATCC
CATGCCCCCTAGCCAGCTGCAGCTGCCTACACTGCCTCTCGTGATGGTGG
CCCCTAGCGGAGCTAGACTGGGCCCTCTGCCTCATCTGCAGGCTCTGCTG
CAGGACCGGCCCCACTTTATGCACCAGCTGAGCACCGTGGACGCCCACGC
CAGAACACCTGTGCTGCAGGTGCACCCCCTGGAAAGCCCTGCCATGATCA
GCCTGACCCCTCCAACCACAGCCACCGGCGTGTTCAGCCTGAAGGCCAGA
CCTGGACTGCCCCCTGGCATCAATGTGGCCAGCCTGGAATGGGTGTCCCG
CGAACCTGCCCTGCTGTGCACCTTCCCCAATCCTAGCGCCCCCAGAAAGG
ACAGCACACTGTCTGCCGTGCCCCAGAGCAGCTATCCCCTGCTGGCTAAC
GGCGTGTGCAAGTGGCCTGGCTGCGAGAAGGTGTTCGAGGAACCCGAGGA
CTTCCTGAAGCACTGCCAGGCCGACCATCTGCTGGACGAGAAAGGCAGAG
CCCAGTGCCTGCTGCAGCGCGAGATGGTGCAGTCCCTGGAACAGCAGCTG
GTGCTGGAAAAAGAAAAGCTGAGCGCCATGCAGGCCCACCTGGCCGGAAA
GATGGCCCTGACAAAAGCCAGCAGCGTGGCCAGCTCCGACAAGGGCAGCT
GTTGTATCGTGGCCGCTGGCAGCCAGGGACCTGTGGTGCCTGCTTGGAGC
GGACCTAGAGAGGCCCCCGATAGCCTGTTTGCCGTGCGGAGACACCTGTG
GGGCAGCCACGGCAACTCTACCTTCCCCGAGTTCCTGCACAACATGGACT
ACTTCAAGTTCCACAACATGAGGCCCCCCTTCACCTACGCCACCCTGATC
AGATGGGCCATTCTGGAAGCCCCCGAGAAGCAGCGGACCCTGAACGAGAT
CTACCACTGGTTTACCCGGATGTTCGCCTTCTTCCGGAACCACCCCGCCA
CCTGGAAGAACGCCATCCGGCACAATCTGAGCCTGCACAAGTGCTTCGTG
CGGGTGGAAAGCGAGAAGGGCGCCGTGTGGACAGTGGACGAGCTGGAATT
TCGGAAGAAGCGGTCCCAGAGGCCCAGCCGGTGTAGCAATCCTACACCTG
GCCCTGAGGGCAGAGGAAGTCTGCTAACATGCGGTGACGTCGAGGAGAAT
CC

[0129] In some embodiments of the invention, the polynucleotide encoding the FOXP3 polypeptide or variant comprises a polynucleotide sequence which is at least 70% identical to SEQ ID NO: 4 or a functional fragment thereof. Suitably, the polynucleotide encoding the FOXP3 polypeptide or variant comprises a polynucleotide sequence which is at least 80%, at least 85%, at least 90%, at least 95%, at least 98% or at least 99% identical to SEQ ID NO: 4 or a functional fragment thereof. In some embodiments of the invention, the polynucleotide encoding the FOXP3 polypeptide or variant comprises or consists of SEQ ID NO: 4 or a functional fragment thereof.

[0130] Suitably, the polynucleotide encoding the FOXP3 polypeptide or functional fragment or variant thereof may be codon optimised. Suitably, the polynucleotide encoding the FOXP3 polypeptide or functional fragment or variant thereof may be codon optimised for expression in a human cell.

[0131] HLA Specific Chimeric Antigen Receptor

[0132] In the present invention, HLA-specific cells are generated by introducing into the cells a polynucleotide (sometimes referred to herein as a second polynucleotide) encoding a HLA-specific chimeric antigen receptor (CAR).

[0133] “Chimeric antigen receptor” or “CAR” or “CARs” as used herein refers to engineered receptors which confer an antigen specificity onto cells, e.g. Tregs. CARs are also known as artificial T-cell receptors, chimeric T-cell receptors or chimeric immunoreceptors. The CARs of the invention comprise a binding domain specific for a HLA, preferably HLA-A2, optionally a hinge domain, a transmembrane domain, and an endodomain (comprising an intracellular signalling domain and optionally one or more co-stimulatory domains).

[0134] CAR-encoding polynucleotides may be transferred to cells using, for example, retroviral vectors. In this way, a large number of antigen-specific T cells can be generated for adoptive cell transfer. When the CAR binds the target-antigen, this results in the transmission of an activating signal to the cell (e.g. Treg) it is expressed on. Thus, the CAR may direct an engineered Treg towards cells expressing the targeted antigen, thereby supressing an immune response against the antigen or a cell comprising the antigen.

[0135] Antigen Recognition Domain

[0136] The CAR of the invention comprises an antigen recognition domain.

[0137] The “antigen recognition domain” as used herein refers to the extracellular part of the CAR that defines the antigen-binding capability of the CAR. In certain aspects of the invention, the antigen recognition domain provides the CAR with the ability to bind to a HLA. Thus, the antigen recognition domain targets an HLA.

[0138] The human leukocyte antigen (HLA) system or complex is a gene complex encoding the major histocompatibility complex (MHC) proteins in humans. HLAs are responsible for the regulation of the immune system in humans.

[0139] Suitably, the HLA is selected from the group consisting of: HLA-A2, HLA-A1, HLA-00701, HLA-A3, HLA-A11, and HLA-A2402. Preferably the HLA is HLA-A2.

[0140] “HLA-A2” may also be referred to as HLA-A*02, HLA-A02, and HLA-A*2. HLA-A*02 is one particular class I major histocompatibility complex (MHC) allele group at the HLA-A locus.

[0141] Suitably, the CAR may comprise an antigen binding domain which is capable of binding to a HLA (preferably HLA-A2), that is present in a graft (transplant) donor but not in a graft (transplant) recipient or vice versa. For example, where the transplant is an organ transplant, the HLA (preferably HLA-A2) may be present in the transplanted organ but not in the patient. Where the transplant is a HSCT (e.g. a bone marrow transplant), the HLA (preferably HLA-A2) may be present in the patient but not in the transplant.

[0142] The antigen recognition domain may bind, suitably specifically bind, one or more region or epitope within a HLA (preferably HLA-A2). An epitope, also known as antigenic determinant, is the part of an antigen that is recognised by an antigen recognition domain (e.g. an antibody). In other words, the epitope is the specific piece of the antigen to which an antibody binds.

[0143] Suitably, the antigen recognition domain binds, suitably specifically binds, to one region or epitope within a HLA (preferably HLA-A2). It will be appreciated by a skilled person that specific binding may occur at more than one region within the HLA (preferably HLA-A2), e.g. due to protein/polypeptide folding.

[0144] The antigen recognition domain used in the present invention may selectively or specifically bind to a HLA (preferably HLA-A2), and thus may have a greater binding affinity for a HLA (preferably HLA-A2) as compared to its binding affinity for other proteins/molecules. Suitably, “specifically binds” as used herein means that the antigen recognition domain does not bind to other proteins or binds with a greatly reduced affinity compared to the binding to a HLA (preferably HLA-A2), to which it specifically binds (e.g. with an affinity of at least 10, 50, 100, 500, 1000 or 10000 times less than its affinity for the HLA (preferably HLA-A2)). Thus, the antigen recognition domain as referred to herein may bind to a HLA (preferably HLA-A2) with at least 10, 50, 100, 500, 1000 or 10000 times the affinity of its binding to other proteins. The binding affinity of the antigen recognition domain can be determined using methods well known in the art such, for example using the Lineweaver-Burk method, or by using commercially available binding model software, such as the 1:1 binding model in the BIAcore 1000 Evaluation software. Suitably, the HBS-P buffer system (0.01M Hepes, pH 7.4, 0.15M NaCl, 0.05% surfactant P20) is used.

[0145] The antigen recognition domain (also known as an antigen-specific targeting domain) may be any protein or peptide that possesses the ability to specifically recognise and bind to a HLA (preferably HLA-A2). The antigen recognition domain includes any naturally occurring, synthetic, semi-synthetic, or recombinantly produced binding partner for a HLA (preferably HLA-A2). Illustrative antigen recognition domains include antibodies, antibody fragments or derivatives, extracellular domains of receptors, ligands for cell surface molecules/receptors, or receptor binding domains thereof, and tumour binding proteins.

[0146] Preferably, the antigen recognition domain is, or is derived from, an antibody (Ab). An antibody-derived antigen recognition domain can be a fragment of an antibody or a genetically engineered product of one of more fragments of the antibody, which fragment is involved in binding with the antigen. Examples include a camelid antibody (VHH), an antigen-binding fragment (Fab), a variable region (Fv), a single chain antibody (scFv), a single-domain antibody (sdAb), a heavy chain variable region (VH), a light chain variable region (VL), and a complementarity determining region (CDR).

[0147] In preferred embodiments, the antigen recognition domain is a single chain antibody (scFv).

[0148] An antibody recognises an antigen via the fragment antigen-binding (Fab) variable region. Antibodies are glycoproteins belonging to the immunoglobulin superfamily. They constitute most of the gamma globulin fraction of the blood proteins. They are typically made of basic structural units, each with two large heavy chains and two small light chains. Camelid antibodies (VHH) lack light chains, and consist of two heavy chains attached to variable domains.

[0149] “Antigen-binding fragment” (Fab) refers to a region on an antibody that binds to antigens. It is composed of one constant and one variable region of each of the heavy and the light chain.

[0150] “Fv” refers to the smallest fragment of an antibody to bear the complete antigen binding site. An Fv fragment consists of the variable regions of a single light chain bound to the variable region of a single heavy chain.

[0151] “Single chain antibody” (scFv) refers to an engineered antibody consisting of a light chain variable region and a heavy chain variable region connected to one another directly or via a peptide linker sequence. Suitable linkers can be readily selected and can be of any suitable length, such as from 1 amino acid (e.g. Gly) to 30 amino acids, e.g. from any one of 2, 3, 4, 5, 6, 7, 8, 9, or 10 amino acids to any one of 12, 15, 18, 20, 21, 25, 30 amino acids, for example, 5-30, 5-25, 6-25, 10-15, 12-25, 15 to 25 etc. The peptide linker sequence is usually about 10 to 25 amino acids in length, rich in glycine for flexibility, and serine or threonine for solubility. Exemplary flexible linkers include glycine polymers (G)n, where n is an integer of at least one, glycine-serine polymers, glycine-alanine polymers, alanine-serine polymers, and other flexible linkers known in the art. The linker may comprise 1 or more “GS” domains. Linkers can have different characteristics and for example may be flexible, rigid or cleavable. The peptide linker sequence can either connect the N-terminus of the heavy chain variable region with the C-terminus of the light chain variable region, or vice versa. The heavy chain variable region and the light chain variable region may be linked via a linker sequence of (X)n, where X is any amino acid and n is an integer of between 1 and 30. The linker sequence may be any linker sequence known in the art.

[0152] “Single-domain antibody” (sdAb), also known as a nanobody, refers to an antibody fragment consisting of a single monomeric variable antibody domain. Accordingly, a sdAb may be a heavy chain variable region (VH) or a light chain variable region (VL).

[0153] “Heavy chain variable region” or “VH” refers to the fragment of the heavy chain of an antibody that contains three CDRs interposed between flanking stretches known as framework regions, which are more highly conserved than the CDRs and form a scaffold to support the CDRs.

[0154] “Light chain variable region” or “VL” refers to the fragment of the light chain of an antibody that contains three CDRs interposed between framework regions.

[0155] “Complementarity determining region” or “CDR” with regard to antibody or antigen-binding fragment thereof refers to a highly variable loop in the variable region of the heavy chain of the light chain of an antibody. CDRs can interact with the antigen conformation and largely determine binding to the antigen (although some framework regions are known to be involved in binding). The heavy chain variable region and the light chain variable region each contain 3 CDRs (heavy chain CDRs 1, 2 and 3 and light chain CDRs 1, 2 and 3, numbered from the amino to the carboxy terminus).

[0156] The CDRs of the variable regions of a heavy and light chain of an antibody can be predicted from the heavy and light chain variable region sequences of the antibody, using prediction software available in the art, e.g. using the Abysis algorithm, or using the IMGT/V-QUEST software, e.g. the IMGT algorithm (ImMunoGeneTics) which can be found at www.IMGT.org, (see for example Lefranc et al, 2009 NAR 37:D1006-D1012 and Lefranc 2003, Leukemia 17: 260-266). CDR regions identified by either algorithm are considered to be equally suitable for use in the invention. CDRs may vary in length, depending on the antibody from which they are predicted and between the heavy and light chains. Thus, the three heavy chain CDRs of an intact antibody may be of different lengths (or may be of the same length) and the three light chain CDRs of an intact antibody may be of different lengths (or may be of the same length). A CDR for example, may range from 2 or 3 amino acids in length to 5, 6, 7, 8, 9, 10, 11, 12, 13, 14, 15, 16, 17, 18, 19 or 20 amino acids in length. Particularly, a CDR may be from 3-14 amino acids in length, e.g. at least 3 amino acids and less than 15 amino acids.

[0157] It should be note that the Kabat nomenclature is followed herein where necessary, in order to define the positioning of the CDRs (Kabat et al, 1991, 5th Ed. Public Health Service, National Institutes of Health, Bethesda, Md., 647-669).

[0158] Antibodies, and derivatives and fragments thereof, that specifically bind to a HLA (preferably HLA-A2) can be prepared using methods well known by those of skill in the art. Such methods include phage display, methods to generate human or humanized antibodies, or methods using transgenic animals or plants engineered to produce human antibodies. Phage display libraries of partially or fully synthetic antibodies are available and can be screened for an antibody or fragment thereof that can bind to a HLA (preferably HLA-A2). Phage display libraries of human antibodies are also available. Once identified, the amino acid sequence or polynucleotide sequence encoding for the antibody (or derivative or fragment thereof) can be isolated and/or determined. The sequence of the antibody can be used to design suitable derivatives or fragments thereof.

[0159] Examples of antibodies, and fragments and derivatives thereof that can be used in the invention are further described below.

[0160] The antigen recognition domain may comprise at least one CDR (e.g. CDR3), which can be predicted from an antibody (or antibody fragment) which binds to a HLA (preferably HLA-A2) or a variant of such a predicted CDR (e.g. a variant with one, two or three amino acid substitutions). It will be appreciated that molecules containing three or fewer CDR regions (e.g. a single CDR or even a part thereof) may be capable of retaining the antigen-binding activity of the antibody from which the CDR is derived. Molecules containing two CDR regions are described in the art as being capable of binding to a target antigen, e.g. in the form of a minibody (Vaughan and Sollazzo, 2001, Combinational Chemistry & High Throughput Screening, 4, 417-430). Molecules containing a single CDR have been described which can display strong binding activity to target (Nicaise et al, 2004, Protein Science, 13: 1882-91).

[0161] In this respect, the antigen recognition domain may comprise one or more variable heavy chain CDRs, e.g. one, two or three variable heavy chain CDRs. Alternatively, or additionally, the antigen recognition domain may comprise one or more variable light chain CDRs, e.g. one, two or three variable light chain CDRs. The antigen recognition domain may comprise three heavy chain CDRs and/or three light chain CDRs (and more particularly a heavy chain variable region comprising three CDRs and/or a light chain variable region comprising three CDRs) wherein at least one CDR, preferably all CDRs, may be from an antibody which binds to a HLA (preferably HLA-A2) or may be selected from one of the CDR sequences provided below.

[0162] The antigen recognition domain may comprise any combination of variable heavy and light chain CDRs, e.g. one variable heavy chain CDR together with one variable light chain CDR, two variable heavy chain CDRs together with one variable light chain CDR, two variable heavy chain CDRs together with two variable light chain CDRs, three variable heavy chain CDRs together with one or two variable light chain CDRs, one variable heavy chain CDR together with two or three variable light chain CDRs, or three variable heavy chain CDRs together with three variable light chain CDRs. Preferably, the antigen recognition domain comprises three variable heavy chain CDRs (CDR1, CDR2 and CDR3) and/or three variable light chain CDRs (CDR1, CDR2 and CDR3).

[0163] The one or more CDRs present within the antigen recognition domain may not all be from the same antibody, as long as the domain has the binding activity described above. Thus, one CDR may be predicted from the heavy or light chains of an antibody which binds to a HLA (preferably HLA-A2) whilst another CDR present may be predicted from a different antibody which also binds to a HLA (preferably HLA-A2). In this instance, it may be preferred that CDR3 be predicted from an antibody that binds to a HLA (preferably HLA-A2). Particularly however, if more than one CDR is present in the antigen recognition domain, it is preferred that the CDRs are predicted from antibodies which bind to a HLA (preferably HLA-A2), particularly the same region or epitope of the HLA. A combination of CDRs may be used from different antibodies, particularly from antibodies that bind to the same region or epitope.

[0164] In a particularly preferred embodiment, the antigen recognition domain comprises three CDRs predicted from the variable heavy chain sequence of an antibody (or antibody fragment) which binds to a HLA (preferably HLA-A2) and/or three CDRs predicted from the variable light chain sequence of an antibody (or antibody fragment) which binds to a HLA (preferably HLA-A2) (preferably the same antibody or antibody fragment).

[0165] In some embodiments, the antigen recognition domain is, or is derived from an antibody (e.g. is a Fab, scFv, or sdAb) wherein the antibody comprises one or more CDR regions, selected from SEQ ID NOs: 5-133, or derivatives thereof (e.g. derivatives comprising 1, 2 or 3 substitutions, preferably one substitution). In other words, in some embodiments the antigen recognition domain comprises one or more CDR regions, selected from SEQ ID NOs: 5-133, or derivatives thereof (e.g. derivatives comprising 1, 2 or 3 substitutions, preferably one substitution). Suitably, the antigen recognition domain comprises three CDR regions selected from SEQ ID NOs: 5-133, or derivatives thereof.

| Name | CDR1 | CDR2 | CDR3 |
|---|---|---|---|
| VH CDRs 1 | DYGMH | FIRNDGSDKYYADSVKG | NGESGPLDYWYFDL |
| | (SEQ ID NO: 5) | (SEQ ID NO: 6) | (SEQ ID NO: 7) |
| VH CDRs 2 | DYGMH | FIRNDGSDKYYADSVKG | NGESGPLDYWYLDL |
| | (SEQ ID NO: 8) | (SEQ ID NO: 9) | (SEQ ID NO: 10) |
| VH CDRs 3 | DYGMH | FIRNDGSDKYYADSVRG | NGESGPLDYWYFDL |
| | (SEQ ID NO: 11) | (SEQ ID NO: 12) | (SEQ ID NO: 13) |
| VH CDRs 4 | DYGMH | FIRNDGSDKYYADSVKG | NGESGPLDYWYFDL |
| | (SEQ ID NO: 14) | (SEQ ID NO: 15) | (SEQ ID NO: 16) |
| VL CDRs 1 | QASQDISNYLN | DASNLET | QQYDNLPPT |
| | (SEQ ID NO: 17) | (SEQ ID NO: 18) | (SEQ ID NO: 19) |
| VL CDRs 2 | QSSLDISHYLN | DASNLET | QQYDNLPLT |
| | (SEQ ID NO: 20) | (SEQ ID NO: 21) | (SEQ ID NO: 22) |
| VL CDRs 3 | RASHGINNYLA | AASTLQS | QQYDSYPPT |
| | (SEQ ID NO: 23) | (SEQ ID NO: 24) | (SEQ ID NO: 25) |
| VL CDRs 4 | QASQDISNYLN | DASNLET | QQYSSFPLT |
| | (SEQ ID NO: 26) | (SEQ ID NO: 27) | (SEQ ID NO: 28) |
| VL CDRs 5 | QASQDISNYLN | DETHLDS | QQYDSLPPT |
| | (SEQ ID NO: 29) | (SEQ ID NO: 30) | (SEQ ID NO: 31) |
| VL CDRs 6 | QASQDISNYLN | DASNLET | QQYDNLPIT |
| | (SEQ ID NO: 32) | (SEQ ID NO: 33) | (SEQ ID NO: 34) |
| VL CDRs 7 | QASQDISNYLN | DASNLET | QQYDNLPST |
| | (SEQ ID NO: 35) | (SEQ ID NO: 36) | (SEQ ID NO: 37) |
| VL CDRs 8 | QASQDISNYLN | DASNLET | QQYNTYPLT |
| | (SEQ ID NO: 38) | (SEQ ID NO: 39) | (SEQ ID NO: 40) |
| VL CDRs 9 | QASQDISNYLN | DASNLET | QQYHTYPLT |
| | (SEQ ID NO: 41) | (SEQ ID NO: 42) | (SEQ ID NO: 43) |
| VL CDRs 10 | QASQDISNYLN | DASNLET | QQYDNLPLT |
| | (SEQ ID NO: 44) | (SEQ ID NO: 45) | (SEQ ID NO: 46) |
| VL CDRs 11 | RTSQGISSALA | DASSLES | QQFNNYPLT |
| | (SEQ ID NO: 47) | (SEQ ID NO: 48) | (SEQ ID NO: 49) |
| VL CDRs 12 | QASQDISNYLA | AASNLQS | LQDSSYPPT |
| | (SEQ ID NO: 50) | (SEQ ID NO: 51) | (SEQ ID NO: 52) |
| VL CDRs 13 | RASQSISSWLA | KASNLQS | QQYSNYPLT |
| | (SEQ ID NO: 53) | (SEQ ID NO: 54) | (SEQ ID NO: 55) |
| VL CDRs 14 | RASHGISNYFA | ATSTLOS | QQYSSYPLT |
| | (SEQ ID NO: 56) | (SEQ ID NO: 57) | (SEQ ID NO: 58) |
| VL CDRs 15 | RASRGISNYLA | ATSTLQS | QQYDSYPPT |
| | (SEQ ID NO: 59) | (SEQ ID NO: 60) | (SEQ ID NO: 61) |
| VH CDRs 5 | SYAIS | GIIPIFGTANYAQKFQG | GGYDSRGSYYYMDV |
| | (SEQ ID NO: 62) | (SEQ ID NO: 63) | (SEQ ID NO: 64) |
| VH CDRs 6 | SYAMH | VISYDGSNKYYADSVKG | DREELLALFGGMDV |
| | (SEQ ID NO: 65) | (SEQ ID NO: 66) | (SEQ ID NO: 67) |
| VH CDRs 7 | SYAIS | GIIPIFGTANYAQKFQG | PQSRWLQSGDAFDI |
| | (SEQ ID NO: 68) | (SEQ ID NO: 69) | (SEQ ID NO: 70) |
| VH CDRs 8 | SYAMH | RINAGNGNTKYSQKFQG | DLTGTLLFDY |
| | (SEQ ID NO: 71) | (SEQ ID NO: 72) | (SEQ ID NO: 73) |
| VH CDRs 9 | SYAIS | GIIPIFGTANYAQKFQG | RAERWLHLSGAFDI |
| | (SEQ ID NO: 74) | (SEQ ID NO: 75) | (SEQ ID NO: 76) |
| VH CDRs 10 | SYAMS | AISGSGGSTYYADSVKG | GHYGDYV |
| | (SEQ ID NO: 77) | (SEQ ID NO: 78) | (SEQ ID NO: 79) |
| VH CDRs 11 | SYAMH | WINAGNGNTKYSQKFQG | VSSGGAFDI |
| | (SEQ ID NO: 80) | (SEQ ID NO: 81) | (SEQ ID NO: 82) |
| VH CDRs 12 | SYGFS | EIIPMFGTANYAQKLQG | VPRSSSGYNYGMDV |
| | (SEQ ID NO: 83) | (SEQ ID NO: 84) | (SEQ ID NO: 85) |
| VH CDRs 13 | TNSGAWS | RTYYRSKWSTDYALSLQS | ENWNSGGFDY |
| | (SEQ ID NO: 86) | (SEQ ID NO: 87) | (SEQ ID NO: 88) |
| VH CDRs 14 | SYAIS | GIIPIFGTANYAQKFQG | AASRWEPGDAFDI |
| | (SEQ ID NO: 89) | (SEQ ID NO: 90) | (SEQ ID NO: 91) |
| VH CDRs 15 | SYDIS | WISAYNGNTNYAQKLQG | GGRWLRSASSFDY |
| | (SEQ ID NO: 92) | (SEQ ID NO: 93) | (SEQ ID NO: 94) |
| VH CDRs 16 | DHYMS | WISAYNGNTNYAQKLQG | GLDSSAYQGRAFDI |
| | (SEQ ID NO: 95) | (SEQ ID NO: 96) | (SEQ ID NO: 97) |
| VL CDRs 16 | SGSSSNIGGNAVN | SNNQRPS | TAWDDSLRGYL |
| | (SEQ ID NO: 98) | (SEQ ID NO: 99) | (SEQ ID NO: 100) |
| VL CDRs 17 | GGNNIGSKSVH | DDSDRPS | HVWDAKTNHQV |
| | (SEQ ID NO: 101) | (SEQ ID NO: 102) | (SEQ ID NO: 103) |
| VL CDRs 18 | TGTSSDVGGYNRVS | EVSNRPS | SSYTSSSTVV |
| | (SEQ ID NO: 104) | (SEQ ID NO: 105) | (SEQ ID NO: 106) |
| VL CDRs 19 | SGSSSNIGSNGVK | RDYQRPS | AAWDDSLNVV |
| | (SEQ ID NO: 107) | (SEQ ID NO: 108) | (SEQ ID NO: 109) |
| VL CDRs 20 | SGSSSNVGSNTVN | RDYQRPS | GAWDDSLNGYV |
| | (SEQ ID NO: 110) | (SEQ ID NO: 111) | (SEQ ID NO: 112) |
| VL CDRs 21 | SGSSSNIGSNTVN | SNNQRPS | AAWDDSLNGPV |
| | (SEQ ID NO: 113) | (SEQ ID NO: 114) | (SEQ ID NO: 115) |
| VL CDRs 22 | TGTGSDVGGYKYVS | DVNYWPS | SSYRTGDTWV |
| | (SEQ ID NO: 116) | (SEQ ID NO: 117) | (SEQ ID NO: 118) |
| VL CDRs 23 | RASQGISNYLA | AASTLQS | QKYNSAPRT |
| | (SEQ ID NO: 119) | (SEQ ID NO: 120) | (SEQ ID NO: 121) |
| VL CDRs 24 | TGTSSDVGGYNYVS | EVSKRPS | SSYAGSNNYV |
| | (SEQ ID NO: 122) | (SEQ ID NO: 123) | (SEQ ID NO: 124) |
| VL CDRs 25 | GGDNIGGKSVH | HDTDRPS | AVWDASLGGSWL |
| | (SEQ ID NO: 125) | (SEQ ID NO: 126) | (SEQ ID NO: 127) |
| VL CDRs 26 | TGSSSNIGAAYDVH | GDSNRPS | QSFDSSLSGSRV |
| | (SEQ ID NO: 128) | (SEQ ID NO: 129) | (SEQ ID NO: 130) |
| VL CDRs 27 | SGSSSNIGSNPVH | RNNQRPS | AAWDVSLSGVV |
| | (SEQ ID NO: 131) | (SEQ ID NO: 132) | (SEQ ID NO: 133) |

[0166] Preferably, the antigen binding domain comprises CDRs (CDR1, CDR2, and CDR3), or derivatives thereof, selected from the same variable chain. For example, the antigen binding domain may comprise SEQ ID NOs: 5-7; SEQ ID NOs: 8-10; SEQ ID NOs: 11-13; SEQ ID NOs: 14-16; SEQ ID NOs: 17-19; SEQ ID NOs: 20-22; SEQ ID NOs: 23-25; SEQ ID NOs: 26-28; SEQ ID NOs: 29-31; SEQ ID NOs: 32-34; SEQ ID NOs: 35-37; SEQ ID NOs: 38-40; SEQ ID NOs: 41-43; SEQ ID NOs: 44-46; SEQ ID NOs: 47-49; SEQ ID NOs: 50-52; SEQ ID NOs: 53-55; SEQ ID NOs: 56-58; SEQ ID NOs: 59-61; SEQ ID NOs: 62-64; SEQ ID NOs: 65-67; SEQ ID NOs: 68-70; SEQ ID NOs: 71-73; SEQ ID NOs: 74-76; SEQ ID NOs: 77-79; SEQ ID NOs: 80-82; SEQ ID NOs: 83-85; SEQ ID NOs: 86-88; SEQ ID NOs: 89-91; SEQ ID NOs: 92-94; SEQ ID NOs: 95-97; SEQ ID NOs: 98-100; SEQ ID NOs: 101-103; SEQ ID NOs: 104-106; SEQ ID NOs: 107-109; SEQ ID NOs: 110-112; SEQ ID NOs: 113-115; SEQ ID NOs: 116-118; SEQ ID NOs: 119-121; SEQ ID NOs: 122-124; SEQ ID NOs: 125-127; SEQ ID NOs: 128-130; and/or SEQ ID NOs: 131-133, or derivatives thereof.

[0167] In preferred embodiments, the antigen recognition domain comprises a combination variable heavy and variable light CDRs as follows:
[0168] (i) SEQ ID NOs: 5-7 and SEQ ID NOs: 17-19, or derivatives thereof;
[0169] (ii) SEQ ID NOs: 8-10 and SEQ ID NOs: 20-22, or derivatives thereof;
[0170] (iii) SEQ ID NOs: 11-13 and SEQ ID NOs: 23-25, or derivatives thereof;
[0171] (iv) SEQ ID NOs: 14-16 and SEQ ID NOs: 26-28, or derivatives thereof;
[0172] (v) SEQ ID NOs: 14-16 and SEQ ID NOs: 29-31, or derivatives thereof;
[0173] (vi) SEQ ID NOs: 14-16 and SEQ ID NOs: 32-34, or derivatives thereof;
[0174] (vii) SEQ ID NOs: 14-16 and SEQ ID NOs: 35-37, or derivatives thereof;
[0175] (viii) SEQ ID NOs: 14-16 and SEQ ID NOs: 38-40, or derivatives thereof;
[0176] (ix) SEQ ID NOs: 14-16 and SEQ ID NOs: 41-43, or derivatives thereof;
[0177] (x) SEQ ID NOs: 14-16 and SEQ ID NOs: 44-46, or derivatives thereof;
[0178] (xi) SEQ ID NOs: 14-16 and SEQ ID NOs: 47-49, or derivatives thereof;
[0179] (xii) SEQ ID NOs: 14-16 and SEQ ID NOs: 50-52, or derivatives thereof;
[0180] (xiii) SEQ ID NOs: 14-16 and SEQ ID NOs: 53-55, or derivatives thereof;
[0181] (xiv) SEQ ID NOs: 14-16 and SEQ ID NOs: 56-58, or derivatives thereof;
[0182] (xv) SEQ ID NOs: 14-16 and SEQ ID NOs: 59-61, or derivatives thereof;
[0183] (xvi) SEQ ID NOs: 62-64 and SEQ ID NOs: 98-100, or derivatives thereof;
[0184] (xvii) SEQ ID NOs: 65-67 and SEQ ID NOs: 101-103, or derivatives thereof;
[0185] (xviii) SEQ ID NOs: 68-70 and SEQ ID NOs: 104-106, or derivatives thereof;
[0186] (xix) SEQ ID NOs: 71-73 and SEQ ID NOs: 107-109, or derivatives thereof;
[0187] (xx) SEQ ID NOs: 74-76 and SEQ ID NOs: 110-112, or derivatives thereof;
[0188] (xxi) SEQ ID NOs: 77-79 and SEQ ID NOs: 113-115, or derivatives thereof;
[0189] (xxii) SEQ ID NOs: 80-82 and SEQ ID NOs: 116-118, or derivatives thereof;
[0190] (xxiii) SEQ ID NOs: 83-85 and SEQ ID NOs: 119-121, or derivatives thereof;
[0191] (xxiv) SEQ ID NOs: 86-88 and SEQ ID NOs: 122-124, or derivatives thereof;
[0192] (xxv) SEQ ID NOs: 89-91 and SEQ ID NOs: 125-127, or derivatives thereof;
[0193] (xxvi) SEQ ID NOs: 92-94 and SEQ ID NOs: 128-130, or derivatives thereof; or
[0194] (xxvii) SEQ ID NOs: 95-97 and SEQ ID NOs: 131-133, or derivatives thereof.

[0195] The antigen binding domain may comprise or consist of a variable heavy domain selected from SEQ ID NOs: 134-149 or a variant which is at least 80% identical to one or more of SEQ ID NOs: 134-149. The variant may be at least 85%, at least 90%, at least 95%, at least 97%, at least 98% or at least 99% identical to one or more of SEQ ID NOs: 134-149.

| Name | Sequence |
|---|---|
| Variable heavy domain 1 | VQLVQSGGGVVQPGGSLRVSCAASGVTLSDYGMHWVRQAP |
| (SEQ ID NO: 134) | GKGLEWMAFIRNDGSDKYYADSVKGRFTISRDNSKKTVSLQ |
| | MSSLRAEDTAVYYCAKNGESGPLDYWYFDLWGRGTLVTV |
| Variable heavy domain 2 | QVQLVQSGGGVVQPGGSLRVSCAASGVTLSDYGMHWVRQ |
| (SEQ ID NO: 135) | APGKGLEWVAFIRNDGSDKYYADSVKGRFTISRDNSEKTVSL |
| | QMSSLRAEDTAVYYCAKNGESGPLDYWYLDLWGRGT |
| Variable heavy domain 3 | QVQLVQSGGGVVQPGGSMRVSCAASGVTLSDYGMHWVRQ |
| (SEQ ID NO: 136) | APGKGLEWVAFIRNDGSDKYYADSVRGRFTISRDNSKKTVFL |
| | QMNSLRAEDTAVYYCAKNGESGPLDYWYFDLWGRGT |
| Variable heavy domain 4 | QVQLVQSGGGVVQPGGSLRVSCAASGVTLSDYGMHWVRQ |
| (SEQ ID NO: 137) | APGKGLEWMAFIRNDGSDKYYADSVKGRFTISRDNSKKTVSL |
| | QMSSLRAEDTAVYYCAKNGESGPLDYWYFDLWGRGT |
| Variable heavy domain 5 | EVQLVQSGAEVKKPGSSVKVSCKASGGTFSSYAISWVRQAP |
| (SEQ ID NO: 138) | GQGLEWMGGIIPIFGTANYAQKFQGRVTITADESTSTAYMELS |
| | SLRSEDTAVYYCARGGYDSRGSYYYMDVWGKGTTVTVSS |
| Variable heavy domain 6 | QVQLVESGGGVVQPGRSLRLSCAASGFTFSSYAMHWVRQA |
| (SEQ ID NO: 139) | PGKGLEWVAVISYDGSNKYYADSVKGRFTISRDNSKNTLYLQ |
| | MNSLRAEDTAVYYCARDREELLALFGGMDVWGQGTTVTVSS |
| Variable heavy domain 7 | EVQLVQSGAEVKKPGSSVKVSCKASGGTFSSYAISWVRQAP |
| (SEQ ID NO: 140) | GQGLEWMGGIIPIFGTANYAQKFQGRVTITADKSTSTAYMELS |
| | SLRSEDTAVYYCARPQSRWLQSGDAFDIWGQGTMVTVSS |
| Variable heavy domain 8 | QVQLQQSGAEVKKPGASVKVSCKASGYTFTSYAMHWVRQA |
| (SEQ ID NO: 141) | PGQRLEWMGRINAGNGNTKYSQKFQGRVTITRDTSASTAYM |
| | ELSSLRSEDTAVYYCARDLTGTLLFDYWGQGTLVTVSS |
| Variable heavy domain 9 | QVQLVQSGAEVKKPGSSVKVSCKASGGTFSSYAISWVRQAP |
| (SEQ ID NO: 142) | GQGLEWMGGIIPIFGTANYAQKFQGRATITADESTSTAYMELS |
| | SLRSEDTAVYYCARRAERWLHLSGAFDIWGQGTMVTVSS |
| Variable heavy domain 10 | QVQLVQSGGGLVQPGGSLRLSCAASGFTFSSYAMSWVRQA |
| (SEQ ID NO: 143) | PGKGLEWVSAISGSGGSTYYADSVKGRFTMSRDNAKNSLYL |
| | QMNSLRVEDSAVYYCATGHYGDYVWGQGALVTVSS |
| Variable heavy domain 11 | QVQLQQSGAEVKKPGASVKVSCKASGYTFTSYAMHWVRQA |
| (SEQ ID NO: 144) | PGQRLEWMGWINAGNGNTKYSQKFQGRVTITRDTSASTAYM |
| | ELSSLRSEDTAVYYCARVSSGGAFDIWGQGTVVTVSS |
| Variable heavy domain 12 | QVQLVQSGAEVKKPGSSVKVSCKASGGTFSSYGFSWVRQA |
| (SEQ ID NO: 145) | PGQGLEWMGEIIPMFGTANYAQKLQGRVTITAETSTSTVYME |
| | LSSLRSEDTATYYCARVPRSSSGYNYGMDVWGQGTTVTVSS |
| Variable heavy domain 13 | QVQLQQSGPGLLKPSQTLSLTCAVSGDSVSTNSGAWSWIRQ |
| (SEQ ID NO: 146) | SPSRGLEWLGRTYYRSKWSTDYALSLQSRVTIKSDRSKNQF |
| | SLQLDSVTPEDTAIYYCARENWNSGGFDYWGQGTLVTVPS |
| Variable heavy domain 14 | EVQLVESGAEVKKPGSSVKVSCKASGGTFSSYAISWVRQAP |
| (SEQ ID NO: 147) | GQGLEWMGGIIPIFGTANYAQKFQGRVTITADKSTSTAYMELS |
| | SLRSEDTAVYYCARAASRWEPGDAFDIWGQGTMVTVSS |
| Variable heavy domain 15 | QVQLVQSGAEVKKPGASVKVSCKTSGYTFTSYDISWVRQAP |
| (SEQ ID NO: 148) | GQGLEWMGWISAYNGNTNYAQKLQGRVTMTTDTSTSTAYM |
| | ELRRLRSDDTAVYYCARGGRWLRSASSFDYWGQGTLVTVS |
| | S |
| Variable heavy domain 16 | EVQLVESGGGLVKPGGSLRLSCAASGFTFSDHYMSWVRQA |
| (SEQ ID NO: 149) | PGKGLEWVSYITSGGSSIYYADSVKGRFTISRDNAKNSLYLQ |
| | MNSLRAEDTAVYYCARGLDSSAYQGRAFDIWGQGTMVTVSS |

[0196] The antigen binding domain may comprise or consist of a variable light domain selected from SEQ ID NOs: 150-176 or a variant which is at least 80% identical to one or more of SEQ ID NOs: 150-176. The variant may be at least 85%, at least 90%, at least 95%, at least 97%, at least 98% or at least 99% identical to one or more of SEQ ID NOs: 150-176.

| Name | Sequence |
|---|---|
| Variable light domain 1 | DVVMTQSPSSLSASVGDRVTITCQASQDISNYLNWYQQKPGK |
| (SEQ ID NO: 150) | APKLLIYDASNLETGVPSRFSGSGSGTDFTFTISSLQPEDIATYY |
| | CQQYDNLPPTFGGGTKLTVLG |
| Variable light domain 2 | DVVMTQSPSSLSASVGDRVTITCQSSLDISHYLNWYQQKPGKA |
| (SEQ ID NO: 151) | PKLLIYDASNLETGVPSRFSGSGSGTHFTFTISSLQPEDFATYY |
| | CQQYDNLPLTFGGGTKLEIK |
| Variable light domain 3 | DIVLMQSPSFLSASVGDRVTITCRASHGINNYLAWYQQKPGKA |
| (SEQ ID NO: 152) | PKLLIYAASTLQSGVPSRFSGSGSGTEFTLTISSLQPEDFATYY |
| | CQQYDSYPPTFGRTKVEIKR |
| Variable light domain 4 | DVVMTQSPSSLSASVGDRVTITCQASQDISNYLNWYQQKPGK |
| (SEQ ID NO: 153) | APKLLIYDASNLETGVPSRFSGSGSGTDFTFTISSLQPEDFATY |
| | YCQQYSSFPLTFGGGTKVDIK |
| Variable light domain 5 | DVVMTQSPSSLSASVGDRVTITCQASQDISNYLNWYQQEPGK |
| (SEQ ID NO: 154) | APKLLIYDETHLDSGVPSRFTGSRSGTDFTLTISSLQPEDFATY |
| | YCQQYDSLPPTFGGGTKVDIK |
| Variable light domain 6 | DVVMTQSPSSLSASVGDRVTITCQASQDISNYLNWYQQKPGK |
| (SEQ ID NO: 155) | APKLLIYDASNLETGVPSRFSGSGSGTDFTFTISSLQPEDIATYY |
| | CQQYDNLPITFGGGTKVDIK |
| Variable light domain 7 | DVVMTQSPSSLSASVGDRVTITCQASQDISNYLNWYQQKPGK |
| (SEQ ID NO: 156) | APKLLIYDASNLETGVPSRFSGSGSGTDFTFTISSLQPEDIATYY |
| | CQQYDNLPSTFGGGTKVDIK |
| Variable light domain 8 | DVVMTQSPSSLSASVGDRVTITCQASQDISNYLNWYQQKPGK |
| (SEQ ID NO: 157) | APKLLIYDASNLETGVPSRFSGSGSGTDFTFTISSLQPEDFGTY |
| | YCQQYNTYPLTFGGGTKVDIK |
| Variable light domain 9 | DVVMTQSPSSLTASVGDRVTITCQASQDISNYLNWYQQKPGK |
| (SEQ ID NO: 158) | APKLLIYDASNLETGVPSRFSGSGSGTDFTLSIDSLQPEDFATY |
| | YCQQYHTYPLTFGGGTKVDIK |
| Variable light domain 10 | DVVMTQSPSSLSASVGDRVTITCQASQDISNYLNWYQQKPGK |
| (SEQ ID NO: 159) | APKLLIYDASNLETGVPSRFSGSGSGTDFTFTISSLQPEDIATYY |
| | CQQYDNLPLTFGGGTKVDIK |
| Variable light domain 11 | DVVMTQSPSSLSASVGDRVTITCRTSQGISSALAWYQQKPGK |
| (SEQ ID NO: 160) | APKLLIYDASSLESGVPSRFSGSGSGTDFTLTISSLQPEDFATY |
| | YCQQFNNYPLTFGGGTKVDIK |
| Variable light domain 12 | DVVMTQSPSSLSASVGDRVTITCQASQDISNYLAWYQQKPGR |
| (SEQ ID NO: 161) | APTLLIFAASNLQSGVPSRFSGSGSGTEFTLTISGLQPEDFATY |
| | YCLQDSSYPPTFGGGTKVDIK |
| Variable light domain 13 | DVVMTQSPSTLSASVGDRVTITCRASQSISSWLAWYQQKPGR |
| (SEQ ID NO: 162) | APTLLIYKASNLQSGVPSRFSGSGSGTEFTLTISSLQPDDFASY |
| | YCQQYSNYPLTFGGGTKVDIK |
| Variable light domain 14 | DVVMTQSPSFLSASVGDRVTITCRASHGISNYFAWYQQKPGK |
| (SEQ ID NO: 163) | APKLLIYATSTLQSGVPSRFSGSGSGTEFTLTISGLQPEDFATY |
| | YCQQYSSYPLTFGGGTKVDIK |
| Variable light domain 15 | DVVMTQSPSTLSAYVGDRITITCRASRGISNYLAWYQQKPGKA |
| (SEQ ID NO: 164) | PKLLIYATSTLQSGVPLRFSGSGSGTEFTLTISGLQPEDFATYY |
| | CQQYDSYPPTFGGGTKVDIK |
| Variable light domain 16 | QSVLTQPPSTSGTPGQRVTISCSGSSSNIGGNAVNWYQHFPG |
| (SEQ ID NO: 165) | TAPTLLIYSNNQRPSGVPERFSGSKSGTSASLTVSGLQAEDEA |
| | DYYCTAWDDSLRGYLFGTGTKVTVL |
| Variable light domain 17 | QPVLTQPSSVSVAPGQTARITCGGNNIGSKSVHWYQQKPGQA |
| (SEQ ID NO: 166) | PVLVVYDDSDRPSGIPERFSGSNSGNTATLTISRVEARDEADY |
| | YCHVWDAKTNHQVFGGGTRLTVQ |
| Variable light domain 18 | QPVLTQPRSVSGSPGQSVTISCTGTSSDVGGYNRVSWYQQTP |
| (SEQ ID NO: 167) | GTAPKLMIYEVSNRPSGVSNRFSGSKSGNTASLTISGLQAEDE |
| | ADYYCSSYTSSSTVVFGGGTKLTVL |
| Variable light domain 19 | QSVLTQPPSASGTPGQRVTISCSGSSSNIGSNGVKWYQQLPG |
| (SEQ ID NO: 168) | TAPKLVIYRDYQRPSGVPDRFSGSKSGTSASLAISGLQSEDEA |
| | KYYCAAWDDSLNVVFGGGTQLTVL |
| Variable light domain 20 | QPVLTQSSSASGTPGQRVAISCSGSSSNVGSNTVNWYQQSP |
| (SEQ ID NO: 169) | GTAPKLLISSNHQRPSGVPDRFSGSKFGTSASLAISGLQSEDE |
| | ADYYCGAWDDSLNGYVFGSGTKVTVL |
| Variable light domain 21 | QAGLTQPPSASGTPGQRVTISCSGSSSNIGSNTVNWYQQLPG |
| (SEQ ID NO: 170) | TAPKLLIYSNNQRPSGVPDRFSGSKSGTSASLAISGLQSEDEA |
| | DYYCAAWDDSLNGPVFGGGTKLTVL |
| Variable light domain 22 | QSALTQPASVSGSPGQSITISCTGTGSDVGGYKYVSWYQHHP |
| (SEQ ID NO: 171) | GKAPRLIIYDVNYWPSGVSHRFSGSKSGNTASLTISGLQSEDE |
| | ADYYCSSYRTGDTWVFGGGTKLTVL |
| Variable light domain 23 | DIQMTQSPSSLSASVGDRVTITCRASQGISNYLAWYQQKPGKV |
| (SEQ ID NO: 172) | PKLLIYAASTLQSGVPSRFSGSGSGTDFTLTISSLQPEDVATYY |
| | CQKYNSAPRTFGQGTKVEIK |
| Variable light domain 24 | QPVLTQSSSASGSPGQSVTISCTGTSSDVGGYNYVSWYQQHP |
| (SEQ ID NO: 173) | GKAPKLMIYEVSKRPSGVPDRFSGSKSGSTASLTVSGLQAEDE |
| | AEYYCSSYAGSNNYVFGTGTKVTVL |
| Variable light domain 25 | QPVLTQSSSVSVAPGKTARVTCGGDNIGGKSVHWYQQRAGQ |
| (SEQ ID NO: 174) | APVLVISHDTDRPSGIPERFSGSKSGTSASLAISGLRSEDEADY |
| | YCAVWDASLGGSWLFGGGTKLTVL |
| Variable light domain 26 | AGLTQPPSVSGAPGQRVTISCTGSSSNIGAAYDVHWYQQLPG |
| (SEQ ID NO: 175) | AAPKLLIFGDSNRPSGVPDRFSGSKSDTSASLAITGLQAEDEAD |
| | YYCQSFDSSLSGSRVFGGGTKLTVL |
| Variable light domain 27 | LPVLTQPPSASGTPGQRVTISCSGSSSNIGSNPVHWYQQLPGT |
| (SEQ ID NO: 176) | APKLLVYRNNQRPSGVPDRFSGSKSGTSASLAISGLRSEDEAD |
| | YYCAAWDVSLSGVVFGGGTKLTVL |

[0197] Suitably, the antigen recognition domain comprises a combination of a variable heavy domain and a variable light domain. Preferably, the antigen recognition domain comprises a combination of a variable heavy domain and a variable light domain selected from:
[0198] (i) an amino acid sequence which has at least 80%, at least 85%, at least 90%, at least 95%, at least 98%, at least 99%, or 100% identity to SEQ ID NO: 134 and an amino acid sequence which has at least 80%, at least 85%, at least 90%, at least 95%, at least 98%, at least 99%, or 100% identity to SEQ ID NO: 150;
[0199] (ii) an amino acid sequence which has at least 80%, at least 85%, at least 90%, at least 95%, at least 98%, at least 99%, or 100% identity to SEQ ID NO: 135 and an amino acid sequence which has at least 80%, at least 85%, at least 90%, at least 95%, at least 98%, at least 99%, or 100% identity to SEQ ID NO: 151;
[0200] (iii) an amino acid sequence which has at least 80%, at least 85%, at least 90%, at least 95%, at least 98%, at least 99%, or 100% identity to SEQ ID NO: 136 and an amino acid sequence which has at least 80%, at least 85%, at least 90%, at least 95%, at least 98%, at least 99%, or 100% identity to SEQ ID NO: 152;
[0201] (iv) an amino acid sequence which has at least 80%, at least 85%, at least 90%, at least 95%, at least 98%, at least 99%, or 100% identity to SEQ ID NO: 137 and an amino acid sequence which has at least 80%, at least 85%, at least 90%, at least 95%, at least 98%, at least 99%, or 100% identity to SEQ ID NO: 153;
[0202] (v) an amino acid sequence which has at least 80%, at least 85%, at least 90%, at least 95%, at least 98%, at least 99%, or 100% identity to SEQ ID NO: 137 and an amino acid sequence which has at least 80%, at least 85%, at least 90%, at least 95%, at least 98%, at least 99%, or 100% identity to SEQ ID NO: 154;
[0203] (vi) an amino acid sequence which has at least 80%, at least 85%, at least 90%, at least 95%, at least 98%, at least 99%, or 100% identity to SEQ ID NO: 137 and an amino acid sequence which has at least 80%, at least 85%, at least 90%, at least 95%, at least 98%, at least 99%, or 100% identity to SEQ ID NO: 155;
[0204] (vii) an amino acid sequence which has at least 80%, at least 85%, at least 90%, at least 95%, at least 98%, at least 99%, or 100% identity to SEQ ID NO: 137 and an amino acid sequence which has at least 80%, at least 85%, at least 90%, at least 95%, at least 98%, at least 99%, or 100% identity to SEQ ID NO: 156;
[0205] (viii) an amino acid sequence which has at least 80%, at least 85%, at least 90%, at least 95%, at least 98%, at least 99%, or 100% identity to SEQ ID NO: 137 and an amino acid sequence which has at least 80%, at least 85%, at least 90%, at least 95%, at least 98%, at least 99%, or 100% identity to SEQ ID NO: 157;
[0206] (ix) an amino acid sequence which has at least 80%, at least 85%, at least 90%, at least 95%, at least 98%, at least 99%, or 100% identity to SEQ ID NO: 137 and an amino acid sequence which has at least 80%, at least 85%, at least 90%, at least 95%, at least 98%, at least 99%, or 100% identity to SEQ ID NO: 158;
[0207] (x) an amino acid sequence which has at least 80%, at least 85%, at least 90%, at least 95%, at least 98%, at least 99%, or 100% identity to SEQ ID NO: 137 and an amino acid sequence which has at least 80%, at least 85%, at least 90%, at least 95%, at least 98%, at least 99%, or 100% identity to SEQ ID NO: 159;
[0208] (xi) an amino acid sequence which has at least 80%, at least 85%, at least 90%, at least 95%, at least 98%, at least 99%, or 100% identity to SEQ ID NO: 137 and an amino acid sequence which has at least 80%, at least 85%, at least 90%, at least 95%, at least 98%, at least 99%, or 100% identity to SEQ ID NO: 160;
[0209] (xii) an amino acid sequence which has at least 80%, at least 85%, at least 90%, at least 95%, at least 98%, at least 99%, or 100% identity to SEQ ID NO: 137 and an amino acid sequence which has at least 80%, at least 85%, at least 90%, at least 95%, at least 98%, at least 99%, or 100% identity to SEQ ID NO: 161;
[0210] (xiii) an amino acid sequence which has at least 80%, at least 85%, at least 90%, at least 95%, at least 98%, at least 99%, or 100% identity to SEQ ID NO: 137 and an amino acid sequence which has at least 80%, at least 85%, at least 90%, at least 95%, at least 98%, at least 99%, or 100% identity to SEQ ID NO: 162;
[0211] (xiv) an amino acid sequence which has at least 80%, at least 85%, at least 90%, at least 95%, at least 98%, at least 99%, or 100% identity to SEQ ID NO: 137 and an amino acid sequence which has at least 80%, at least 85%, at least 90%, at least 95%, at least 98%, at least 99%, or 100% identity to SEQ ID NO: 163;
[0212] (xv) an amino acid sequence which has at least 80%, at least 85%, at least 90%, at least 95%, at least 98%, at least 99%, or 100% identity to SEQ ID NO: 137 and an amino acid sequence which has at least 80%, at least 85%, at least 90%, at least 95%, at least 98%, at least 99%, or 100% identity to SEQ ID NO: 164;
[0213] (xvi) an amino acid sequence which has at least 80%, at least 85%, at least 90%, at least 95%, at least 98%, at least 99%, or 100% identity to SEQ ID NO: 138 and an amino acid sequence which has at least 80%, at least 85%, at least 90%, at least 95%, at least 98%, at least 99%, or 100% identity to SEQ ID NO: 165;
[0214] (xvii) an amino acid sequence which has at least 80%, at least 85%, at least 90%, at least 95%, at least 98%, at least 99%, or 100% identity to SEQ ID NO: 139 and an amino acid sequence which has at least 80%, at least 85%, at least 90%, at least 95%, at least 98%, at least 99%, or 100% identity to SEQ ID NO: 166;
[0215] (xviii) an amino acid sequence which has at least 80%, at least 85%, at least 90%, at least 95%, at least 98%, at least 99%, or 100% identity to SEQ ID NO: 140 and an amino acid sequence which has at least 80%, at least 85%, at least 90%, at least 95%, at least 98%, at least 99%, or 100% identity to SEQ ID NO: 167;
[0216] (xix) an amino acid sequence which has at least 80%, at least 85%, at least 90%, at least 95%, at least 98%, at least 99%, or 100% identity to SEQ ID NO: 141 and an amino acid sequence which has at least 80%, at least 85%, at least 90%, at least 95%, at least 98%, at least 99%, or 100% identity to SEQ ID NO: 168;
[0217] (xx) an amino acid sequence which has at least 80%, at least 85%, at least 90%, at least 95%, at least 98%, at least 99%, or 100% identity to SEQ ID NO: 142 and an amino acid sequence which has at least 80%, at least 85%, at least 90%, at least 95%, at least 98%, at least 99%, or 100% identity to SEQ ID NO: 169;
[0218] (xxi) an amino acid sequence which has at least 80%, at least 85%, at least 90%, at least 95%, at least 98%, at least 99%, or 100% identity to SEQ ID NO: 143 and an amino acid sequence which has at least 80%, at least 85%, at least 90%, at least 95%, at least 98%, at least 99%, or 100% identity to SEQ ID NO: 170;
[0219] (xxii) an amino acid sequence which has at least 80%, at least 85%, at least 90%, at least 95%, at least 98%, at least 99%, or 100% identity to SEQ ID NO: 144 and an amino acid sequence which has at least 80%, at least 85%, at least 90%, at least 95%, at least 98%, at least 99%, or 100% identity to SEQ ID NO: 171;
[0220] (xxiii) an amino acid sequence which has at least 80%, at least 85%, at least 90%, at least 95%, at least 98%, at least 99%, or 100% identity to SEQ ID NO: 145 and an amino acid sequence which has at least 80%, at least 85%, at least 90%, at least 95%, at least 98%, at least 99%, or 100% identity to SEQ ID NO: 172;
[0221] (xxiv) an amino acid sequence which has at least 80%, at least 85%, at least 90%, at least 95%, at least 98%, at least 99%, or 100% identity to SEQ ID NO: 146 and an amino acid sequence which has at least 80%, at least 85%, at least 90%, at least 95%, at least 98%, at least 99%, or 100% identity to SEQ ID NO: 173;
[0222] (xxv) an amino acid sequence which has at least 80%, at least 85%, at least 90%, at least 95%, at least 98%, at least 99%, or 100% identity to SEQ ID NO: 147 and an amino acid sequence which has at least 80%, at least 85%, at least 90%, at least 95%, at least 98%, at least 99%, or 100% identity to SEQ ID NO: 174;
[0223] (xxvi) an amino acid sequence which has at least 80%, at least 85%, at least 90%, at least 95%, at least 98%, at least 99%, or 100% identity to SEQ ID NO: 148 and an amino acid sequence which has at least 80%, at least 85%, at least 90%, at least 95%, at least 98%, at least 99%, or 100% identity to SEQ ID NO: 175; or
[0224] (xxvii) an amino acid sequence which has at least 80%, at least 85%, at least 90%, at least 95%, at least 98%, at least 99%, or 100% identity to SEQ ID NO: 149 and an amino acid sequence which has at least 80%, at least 85%, at least 90%, at least 95%, at least 98%, at least 99%, or 100% identity to SEQ ID NO: 176.

[0225] The antigen binding domain may comprise or consist of an amino acid sequence selected from SEQ ID NOs: 177-203 or a variant which is at least 80% identical to one or more of SEQ ID NOs: 177-203. The variant may be at least 85%, at least 90%, at least 95%, at least 97%, at least 98% or at least 99% identical to one or more of SEQ ID NOs: 177-203. The antigen binding domain may comprise a linker sequence of (X)n, where X is any amino acid and n is an integer of between 1 and 30. The linker sequence may be any linker sequence known in the art.

Illustrative antigen binding domain 1 (SEQ ID NO: 177, 251-279):
QVQLVQSGGGVVQPGGSLRVSCAASGVTLSDYGMHWVRQAPGKGLEWVAFIRNDGSDK
YYADSVKGRFTISRDNSEKTVSLQMSSLRAEDTAVYYCAKNGESGPLDYWYLDLWG-(X)n-
DVVMTQSPSSLSASVGDRVTITCQSSLDISHYLNWYQQKPGKAPKLLIYDASNLETGVPSRF
SGSGSGTHFTFTISSLQPEDFATYYCQQYDNLPLTFGGGTKLEIK
Illustrative antigen binding domain 2 (SEQ ID NO: 178):
QVQLVQSGGGVVQPGGSLRVSCAASGVTLSDYGMHWVRQAPGKGLEWMAFIRNDGSDK
YYADSVKGRFTISRDNSKKTVSLQMSSLRAEDTAVYYCAKNGESGPLDYWYFDLWGRGT-
(X)n-
DVVMTQSPSSLSASVGDRVTITCQASQDISNYLNWYQQKPGKAPKLLIYDASNLETGVPSR
FSGSGSGTDFTFTISSLQPEDIATYYCQQYDNLPPTFGGGTKLTVLG
Illustrative antigen binding domain 3 (SEQ ID NO: 179, 280-308):
QVQLVQSGGGVVQPGGSMRVSCAASGVTLSDYGMHWVRQAPGKGLEWVAFIRNDGSDK
YYADSVRGRFTISRDNSKKTVFLQMNSLRAEDTAVYYCAKNGESGPLDYWYFDLWGRGT-
(X)n-
DIVLMQSPSFLSASVGDRVTITCRASHGINNYLAWYQQKPGKAPKLLIYAASTLQSGVPSRF
SGSGSGTEFTLTISSLQPEDFATYYCQQYDSYPPTFGRTKVEIKR
Illustrative antigen binding domain 4 (SEQ ID NO: 180, 309-337):
QVQLVQSGGGVVQPGGSLRVSCAASGVTLSDYGMHWVRQAPGKGLEWMAFIRNDGSDK
YYADSVKGRFTISRDNSKKTVSLQMSSLRAEDTAVYYCAKNGESGPLDYWYFDLWGRGT-
(X)n-
DVVMTQSPSSLSASVGDRVTITCQASQDISNYLNWYQQKPGKAPKLLIYDASNLETGVPSR
FSGSGSGTDFTFTISSLQPEDFATYYCQQYSSFPLTFGGGTKVDIK
Illustrative antigen binding domain 5 (SEQ ID NO: 181,338-366):
QVQLVQSGGGVVQPGGSLRVSCAASGVTLSDYGMHWVRQAPGKGLEWMAFIRNDGSDK
YYADSVKGRFTISRDNSKKTVSLQMSSLRAEDTAVYYCAKNGESGPLDYWYFDLWGRGT-
(X)n-
DVVMTQSPSSLSASVGDRVTITCQASQDISNYLNWYQQEPGKAPKLLIYDETHLDSGVPSR
FTGSRSGTDFTLTISSLQPEDFATYYCQQYDSLPPTFGGGTKVDIK
Illustrative antigen binding domain 6 (SEQ ID NO: 182, 367-395):
QVQLVQSGGGVVQPGGSLRVSCAASGVTLSDYGMHWVRQAPGKGLEWMAFIRNDGSDK
YYADSVKGRFTISRDNSKKTVSLQMSSLRAEDTAVYYCAKNGESGPLDYWYFDLWGRGT-
(X)n-
DVVMTQSPSSLSASVGDRVTITCQASQDISNYLNWYQQKPGKAPKLLIYDASNLETGVPSR
FSGSGSGTDFTFTISSLQPEDIATYYCQQYDNLPITFGGGTKVDIK
Illustrative antigen binding domain 7 (SEQ ID NO: 183, 396-424):
QVQLVQSGGGVVQPGGSLRVSCAASGVTLSDYGMHWVRQAPGKGLEWMAFIRNDGSDK
YYADSVKGRFTISRDNSKKTVSLQMSSLRAEDTAVYYCAKNGESGPLDYWYFDLWGRGT-
(X)n-
DVVMTQSPSSLSASVGDRVTITCQASQDISNYLNWYQQKPGKAPKLLIYDASNLETGVPSR
FSGSGSGTDFTFTISSLQPEDIATYYCQQYDNLPSTFGGGTKVDIK
Illustrative antigen binding domain 8 (SEQ ID NO: 184, 425-453):
QVQLVQSGGGVVQPGGSLRVSCAASGVTLSDYGMHWVRQAPGKGLEWMAFIRNDGSDK
YYADSVKGRFTISRDNSKKTVSLQMSSLRAEDTAVYYCAKNGESGPLDYWYFDLWGRGT-
(X)n-
DVVMTQSPSSLSASVGDRVTITCQASQDISNYLNWYQQKPGKAPKLLIYDASNLETGVPSR
FSGSGSGTDFTFTISSLQPEDFGTYYCQQYNTYPLTFGGGTKVDIK
Illustrative antigen binding domain 9 (SEQ ID NO: 185, 454-482):
QVQLVQSGGGVVQPGGSLRVSCAASGVTLSDYGMHWVRQAPGKGLEWMAFIRNDGSDK
YYADSVKGRFTISRDNSKKTVSLQMSSLRAEDTAVYYCAKNGESGPLDYWYFDLWGRGT-
(X)n-
DVVMTQSPSSLTASVGDRVTITCQASQDISNYLNWYQQKPGKAPKLLIYDASNLETGVPSR
FSGSGSGTDFTLSIDSLQPEDFATYYCQQYHTYPLTFGGGTKVDIK
Illustrative antigen binding domain 10 (SEQ ID NO: 186, 483-511):
QVQLVQSGGGVVQPGGSLRVSCAASGVTLSDYGMHWVRQAPGKGLEWMAFIRNDGSDK
YYADSVKGRFTISRDNSKKTVSLQMSSLRAEDTAVYYCAKNGESGPLDYWYFDLWGRGT-
(X)n-
DVVMTQSPSSLSASVGDRVTITCQASQDISNYLNWYQQKPGKAPKLLIYDASNLETGVPSR
FSGSGSGTDFTFTISSLQPEDIATYYCQQYDNLPLTFGGGTKVDIK
Illustrative antigen binding domain 11 (SEQ ID NO: 187, 512-540):
QVQLVQSGGGVVQPGGSLRVSCAASGVTLSDYGMHWVRQAPGKGLEWMAFIRNDGSDK
YYADSVKGRFTISRDNSKKTVSLQMSSLRAEDTAVYYCAKNGESGPLDYWYFDLWGRGT-
(X)n-
DVVMTQSPSSLSASVGDRVTITCRTSQGISSALAWYQQKPGKAPKLLIYDASSLESGVPSR
FSGSGSGTDFTLTISSLQPEDFATYYCQQFNNYPLTFGGGTKVDIK
Illustrative antigen binding domain 12 (SEQ ID NO: 188, 541-569):
QVQLVQSGGGVVQPGGSLRVSCAASGVTLSDYGMHWVRQAPGKGLEWMAFIRNDGSDK
YYADSVKGRFTISRDNSKKTVSLQMSSLRAEDTAVYYCAKNGESGPLDYWYFDLWGRGT-
(X)n-
DVVMTQSPSSLSASVGDRVTITCQASQDISNYLAWYQQKPGRAPTLLIFAASNLQSGVPSR
FSGSGSGTEFTLTISGLQPEDFATYYCLQDSSYPPTFGGGTKVDIK
Illustrative antigen binding domain 13 (SEQ ID NO: 189, 570-598):
QVQLVQSGGGVVQPGGSLRVSCAASGVTLSDYGMHWVRQAPGKGLEWMAFIRNDGSDK
YYADSVKGRFTISRDNSKKTVSLQMSSLRAEDTAVYYCAKNGESGPLDYWYFDLWGRGT-
(X)n-
DVVMTQSPSTLSASVGDRVTITCRASQSISSWLAWYQQKPGRAPTLLIYKASNLQSGVPSR
FSGSGSGTEFTLTISSLQPDDFASYYCQQYSNYPLTFGGGTKVDIK
Illustrative antigen binding domain 14 (SEQ ID NO: 190, 599-627):
QVQLVQSGGGVVQPGGSLRVSCAASGVTLSDYGMHWVRQAPGKGLEWMAFIRNDGSDK
YYADSVKGRFTISRDNSKKTVSLQMSSLRAEDTAVYYCAKNGESGPLDYWYFDLWGRGT-
(X)n-
DVVMTQSPSFLSASVGDRVTITCRASHGISNYFAWYQQKPGKAPKLLIYATSTLQSGVPSR
FSGSGSGTEFTLTISGLQPEDFATYYCQQYSSYPLTFGGGTKVDIK
Illustrative antigen binding domain 15 (SEQ ID NO: 191,628-656):
QVQLVQSGGGVVQPGGSLRVSCAASGVTLSDYGMHWVRQAPGKGLEWMAFIRNDGSDK
YYADSVKGRFTISRDNSKKTVSLQMSSLRAEDTAVYYCAKNGESGPLDYWYFDLWGRGT-
(X)n-
DVVMTQSPSTLSAYVGDRITITCRASRGISNYLAWYQQKPGKAPKLLIYATSTLQSGVPLRF
SGSGSGTEFTLTISGLQPEDFATYYCQQYDSYPPTFGGGTKVDIK
Illustrative antigen binding domain 16 (SEQ ID NO: 192, 657-685):
EVQLVQSGAEVKKPGSSVKVSCKASGGTFSSYAISWVRQAPGQGLEWMGGIIPIFGTANYA
QKFQGRVTITADESTSTAYMELSSLRSEDTAVYYCARGGYDSRGSYYYMDVWGKGTTVTV
SS-(X)n-
QSVLTQPPSTSGTPGQRVTISCSGSSSNIGGNAVNWYQHFPGTAPTLLIYSNNQRPSGVPE
RFSGSKSGTSASLTVSGLQAEDEADYYCTAWDDSLRGYLFGTGTKVTVL
Illustrative antigen binding domain 17 (SEQ ID NO: 193, 686-714):
QVQLVESGGGVVQPGRSLRLSCAASGFTFSSYAMHWVRQAPGKGLEWVAVISYDGSNKY
YADSVKGRFTISRDNSKNTLYLQMNSLRAEDTAVYYCARDREELLALFGGMDVWGQGTTV
TVSS-(X)n-
QPVLTQPSSVSVAPGQTARITCGGNNIGSKSVHWYQQKPGQAPVLVVYDDSDRPSGIPER
FSGSNSGNTATLTISRVEARDEADYYCHVWDAKTNHQVFGGGTRLTVQ
Illustrative antigen binding domain 18 (SEQ ID NO: 194, 715-743):
EVQLVQSGAEVKKPGSSVKVSCKASGGTFSSYAISWVRQAPGQGLEWMGGIIPIFGTANYA
QKFQGRVTITADKSTSTAYMELSSLRSEDTAVYYCARPQSRWLQSGDAFDIWGQGTMVTV
SS-(X)n-
QPVLTQPRSVSGSPGQSVTISCTGTSSDVGGYNRVSWYQQTPGTAPKLMIYEVSNRPSGV
SNRFSGSKSGNTASLTISGLQAEDEADYYCSSYTSSSTVVFGGGTKLTVL
Illustrative antigen binding domain 19 (SEQ ID NO: 195, 744-772):
QVQLQQSGAEVKKPGASVKVSCKASGYTFTSYAMHWVRQAPGQRLEWMGRINAGNGNT
KYSQKFQGRVTITRDTSASTAYMELSSLRSEDTAVYYCARDLTGTLLFDYWGQGTLVTVSS
-(X)n-
QSVLTQPPSASGTPGQRVTISCSGSSSNIGSNGVKWYQQLPGTAPKLVIYRDYQRPSGVP
DRFSGSKSGTSASLAISGLQSEDEAKYYCAAWDDSLNVVFGGGTQLTVL
Illustrative antigen binding domain 20 (SEQ ID NO: 196, 773-801):
QVQLVQSGAEVKKPGSSVKVSCKASGGTFSSYAISWVRQAPGQGLEWMGGIIPIFGTANY
AQKFQGRATITADESTSTAYMELSSLRSEDTAVYYCARRAERWLHLSGAFDIWGQGTMVT
VSS-(X)n-
QPVLTQSSSASGTPGQRVAISCSGSSSNVGSNTVNWYQQSPGTAPKLLISSNHQRPSGVP
DRFSGSKFGTSASLAISGLQSEDEADYYCGAWDDSLNGYVFGSGTKVTVL
Illustrative antigen binding domain 21 (SEQ ID NO: 197, 802-830):
QVQLVQSGGGLVQPGGSLRLSCAASGFTFSSYAMSWVRQAPGKGLEWVSAISGSGGSTY
YADSVKGRFTMSRDNAKNSLYLQMNSLRVEDSAVYYCATGHYGDYVWGQGALVTVSS-
(X)n-
QAGLTQPPSASGTPGQRVTISCSGSSSNIGSNTVNWYQQLPGTAPKLLIYSNNQRPSGVPD
RFSGSKSGTSASLAISGLQSEDEADYYCAAWDDSLNGPVFGGGTKLTVL
Illustrative antigen binding domain 22 (SEQ ID NO: 198, 831-859):
QVQLQQSGAEVKKPGASVKVSCKASGYTFTSYAMHWVRQAPGQRLEWMGWINAGNGNT
KYSQKFQGRVTITRDTSASTAYMELSSLRSEDTAVYYCARVSSGGAFDIWGQGTVVTVSS-
(X)n-
QSALTQPASVSGSPGQSITISCTGTGSDVGGYKYVSWYQHHPGKAPRLIIYDVNYWPSGVS
HRFSGSKSGNTASLTISGLQSEDEADYYCSSYRTGDTWVFGGGTKLTVL
Illustrative antigen binding domain 23 (SEQ ID NO: 199, 860-888):
QVQLVQSGAEVKKPGSSVKVSCKASGGTFSSYGFSWVRQAPGQGLEWMGEIIPMFGTAN
YAQKLQGRVTITAETSTSTVYMELSSLRSEDTATYYCARVPRSSSGYNYGMDVWGQGTTV
TVSS-(X)n-
DIQMTQSPSSLSASVGDRVTITCRASQGISNYLAWYQQKPGKVPKLLIYAASTLQSGVPSRF
SGSGSGTDFTLTISSLQPEDVATYYCQKYNSAPRTFGQGTKVEIK
Illustrative antigen binding domain 24 (SEQ ID NO: 200, 889-917):
QVQLQQSGPGLLKPSQTLSLTCAVSGDSVSTNSGAWSWIRQSPSRGLEWLGRTYYRSKW
STDYALSLQSRVTIKSDRSKNQFSLQLDSVTPEDTAIYYCARENWNSGGFDYWGQGTLVTV
PS-(X)n-
QPVLTQSSSASGSPGQSVTISCTGTSSDVGGYNYVSWYQQHPGKAPKLMIYEVSKRPSGV
PDRFSGSKSGSTASLTVSGLQAEDEAEYYCSSYAGSNNYVFGTGTKVTVL
Illustrative antigen binding domain 25 (SEQ ID NO: 201,918-946):
EVQLVESGAEVKKPGSSVKVSCKASGGTFSSYAISWVRQAPGQGLEWMGGIIPIFGTANYA
QKFQGRVTITADKSTSTAYMELSSLRSEDTAVYYCARAASRWEPGDAFDIWGQGTMVTVS
S-(X)n-
QPVLTQSSSVSVAPGKTARVTCGGDNIGGKSVHWYQQRAGQAPVLVISHDTDRPSGIPER
FSGSKSGTSASLAISGLRSEDEADYYCAVWDASLGGSWLFGGGTKLTVL
Illustrative antigen binding domain 26 (SEQ ID NO: 202, 947-975):
QVQLVQSGAEVKKPGASVKVSCKTSGYTFTSYDISWVRQAPGQGLEWMGWISAYNGNTN
YAQKLQGRVTMTTDTSTSTAYMELRRLRSDDTAVYYCARGGRWLRSASSFDYWGQGTLV
TVSS-(X)n-
QAGLTQPPSVSGAPGQRVTISCTGSSSNIGAAYDVHWYQQLPGAAPKLLIFGDSNRPSGVP
DRFSGSKSDTSASLAITGLQAEDEADYYCQSFDSSLSGSRVFGGGTKLTVL
Illustrative antigen binding domain 27(SEQ ID NO: 203, 976-1004):
EVQLVESGGGLVKPGGSLRLSCAASGFTFSDHYMSWVRQAPGKGLEWVSYITSGGSSIYY
ADSVKGRFTISRDNAKNSLYLQMNSLRAEDTAVYYCARGLDSSAYQGRAFDIWGQGTMVT
VSS-(X)n-
LPVLTQPPSASGTPGQRVTISCSGSSSNIGSNPVHWYQQLPGTAPKLLVYRNNQRPSGVP
DRFSGSKSGTSASLAISGLRSEDEADYYCAAWDVSLSGVVFGGGTKLTVL

[0226] The antigen recognition domain variants described herein retain antigen-binding ability. For example, the variants may be capable of binding HLA-A2 to at least 10%, at least 20%, at least 30%, at least 40%, at least 50%, at least 60%, at least 70%, at least 80%, or at least 90% of the level of the corresponding reference amino acid sequence. The variant may be capable of binding HLA-A2 to a similar or the same level as the corresponding reference amino acid sequence or may be capable of binding HLA-A2 to a greater level than the corresponding reference amino acid sequence (e.g. increased by at least 10%, at least 20%, at least 30%, at least 40% or at least 50%). Accordingly, the antigen recognition domain may comprise or consist of an amino acid sequence comprising one or more (e.g. one, two, three, four, five, or six) of the CDRs of SEQ ID NOs: 5-133 (shown above, underlined in SEQ ID NOs: 134-176).

[0227] Substitutions, variations, modifications, replacements, deletions and/or additions of one (or more) amino acid residues may occur in the framework region.

[0228] Thus, in some embodiments the antigen recognition domain comprises or consists of:
[0229] (i) an amino acid sequence which has at least 80%, at least 85%, at least 90%, at least 95%, at least 98%, at least 99%, or 100% identity to SEQ ID NO: 134, wherein the amino acid sequence comprises CDR1, CDR2 and CDR3 regions consisting of SEQ ID NOs: 5-7, respectively, and/or an amino acid sequence which has at least 80%, at least 85%, at least 90%, at least 95%, at least 98%, at least 99%, or 100% identity to SEQ ID NO: 150, wherein the amino acid sequence comprises CDR1, CDR2 and CDR3 regions consisting of SEQ ID NOs: 17-19, respectively;
[0230] (ii) an amino acid sequence which has at least 80%, at least 85%, at least 90%, at least 95%, at least 98%, at least 99%, or 100% identity to SEQ ID NO: 135, wherein the amino acid sequence comprises CDR1, CDR2 and CDR3 regions consisting of SEQ ID NOs: 8-10, respectively, and/or an amino acid sequence which has at least 80%, at least 85%, at least 90%, at least 95%, at least 98%, at least 99%, or 100% identity to SEQ ID NO: 151, wherein the amino acid sequence comprises CDR1, CDR2 and CDR3 regions consisting of SEQ ID NOs: 20-22, respectively;
[0231] (iii) an amino acid sequence which has at least 80%, at least 85%, at least 90%, at least 95%, at least 98%, at least 99%, or 100% identity to SEQ ID NO: 136, wherein the amino acid sequence comprises CDR1, CDR2 and CDR3 regions consisting of SEQ ID NOs: 11-13, respectively, and/or an amino acid sequence which has at least 80%, at least 85%, at least 90%, at least 95%, at least 98%, at least 99%, or 100% identity to SEQ ID NO: 152, wherein the amino acid sequence comprises CDR1, CDR2 and CDR3 regions consisting of SEQ ID NOs: 23-25, respectively;
[0232] (iv) an amino acid sequence which has at least 80%, at least 85%, at least 90%, at least 95%, at least 98%, at least 99%, or 100% identity to SEQ ID NO: 137, wherein the amino acid sequence comprises CDR1, CDR2 and CDR3 regions consisting of SEQ ID NOs: 14-16, respectively, and/or an amino acid sequence which has at least 80%, at least 85%, at least 90%, at least 95%, at least 98%, at least 99%, or 100% identity to SEQ ID NO: 153, wherein the amino acid sequence comprises CDR1, CDR2 and CDR3 regions consisting of SEQ ID NOs: 26-28, respectively;
[0233] (v) an amino acid sequence which has at least 80%, at least 85%, at least 90%, at least 95%, at least 98%, at least 99%, or 100% identity to SEQ ID NO: 137, wherein the amino acid sequence comprises CDR1, CDR2 and CDR3 regions consisting of SEQ ID NOs: 14-16, respectively, and/or an amino acid sequence which has at least 80%, at least 85%, at least 90%, at least 95%, at least 98%, at least 99%, or 100% identity to SEQ ID NO: 154, wherein the amino acid sequence comprises CDR1, CDR2 and CDR3 regions consisting of SEQ ID NOs: 29-31, respectively;
[0234] (vi) an amino acid sequence which has at least 80%, at least 85%, at least 90%, at least 95%, at least 98%, at least 99%, or 100% identity to SEQ ID NO: 137, wherein the amino acid sequence comprises CDR1, CDR2 and CDR3 regions consisting of SEQ ID NOs: 14-16, respectively, and/or an amino acid sequence which has at least 80%, at least 85%, at least 90%, at least 95%, at least 98%, at least 99%, or 100% identity to SEQ ID NO: 155, wherein the amino acid sequence comprises CDR1, CDR2 and CDR3 regions consisting of SEQ ID NOs: 32-34, respectively;
[0235] (vii) an amino acid sequence which has at least 80%, at least 85%, at least 90%, at least 95%, at least 98%, at least 99%, or 100% identity to SEQ ID NO: 137, wherein the amino acid sequence comprises CDR1, CDR2 and CDR3 regions consisting of SEQ ID NOs: 14-16, respectively, and/or an amino acid sequence which has at least 80%, at least 85%, at least 90%, at least 95%, at least 98%, at least 99%, or 100% identity to SEQ ID NO: 156, wherein the amino acid sequence comprises CDR1, CDR2 and CDR3 regions consisting of SEQ ID NOs: 35-37, respectively;
[0236] (viii) an amino acid sequence which has at least 80%, at least 85%, at least 90%, at least 95%, at least 98%, at least 99%, or 100% identity to SEQ ID NO: 137, wherein the amino acid sequence comprises CDR1, CDR2 and CDR3 regions consisting of SEQ ID NOs: 14-16, respectively, and/or an amino acid sequence which has at least 80%, at least 85%, at least 90%, at least 95%, at least 98%, at least 99%, or 100% identity to SEQ ID NO: 157, wherein the amino acid sequence comprises CDR1, CDR2 and CDR3 regions consisting of SEQ ID NOs: 38-40, respectively;
[0237] (ix) an amino acid sequence which has at least 80%, at least 85%, at least 90%, at least 95%, at least 98%, at least 99%, or 100% identity to SEQ ID NO: 137, wherein the amino acid sequence comprises CDR1, CDR2 and CDR3 regions consisting of SEQ ID NOs: 14-16, respectively, and/or an amino acid sequence which has at least 80%, at least 85%, at least 90%, at least 95%, at least 98%, at least 99%, or 100% identity to SEQ ID NO: 158, wherein the amino acid sequence comprises CDR1, CDR2 and CDR3 regions consisting of SEQ ID NOs: 41-43, respectively;
[0238] (x) an amino acid sequence which has at least 80%, at least 85%, at least 90%, at least 95%, at least 98%, at least 99%, or 100% identity to SEQ ID NO: 137, wherein the amino acid sequence comprises CDR1, CDR2 and CDR3 regions consisting of SEQ ID NOs: 14-16, respectively, and/or an amino acid sequence which has at least 80%, at least 85%, at least 90%, at least 95%, at least 98%, at least 99%, or 100% identity to SEQ ID NO: 159, wherein the amino acid sequence comprises CDR1, CDR2 and CDR3 regions consisting of SEQ ID NOs: 44-46, respectively;
[0239] (xi) an amino acid sequence which has at least 80%, at least 85%, at least 90%, at least 95%, at least 98%, at least 99%, or 100% identity to SEQ ID NO: 137, wherein the amino acid sequence comprises CDR1, CDR2 and CDR3 regions consisting of SEQ ID NOs: 14-16, respectively, and/or an amino acid sequence which has at least 80%, at least 85%, at least 90%, at least 95%, at least 98%, at least 99%, or 100% identity to SEQ ID NO: 160, wherein the amino acid sequence comprises CDR1, CDR2 and CDR3 regions consisting of SEQ ID NOs: 47-49, respectively;
[0240] (xii) an amino acid sequence which has at least 80%, at least 85%, at least 90%, at least 95%, at least 98%, at least 99%, or 100% identity to SEQ ID NO: 137, wherein the amino acid sequence comprises CDR1, CDR2 and CDR3 regions consisting of SEQ ID NOs: 14-16, respectively, and/or an amino acid sequence which has at least 80%, at least 85%, at least 90%, at least 95%, at least 98%, at least 99%, or 100% identity to SEQ ID NO: 161, wherein the amino acid sequence comprises CDR1, CDR2 and CDR3 regions consisting of SEQ ID NOs: 50-52, respectively;
[0241] (xiii) an amino acid sequence which has at least 80%, at least 85%, at least 90%, at least 95%, at least 98%, at least 99%, or 100% identity to SEQ ID NO: 137, wherein the amino acid sequence comprises CDR1, CDR2 and CDR3 regions consisting of SEQ ID NOs: 14-16, respectively, and/or an amino acid sequence which has at least 80%, at least 85%, at least 90%, at least 95%, at least 98%, at least 99%, or 100% identity to SEQ ID NO: 162, wherein the amino acid sequence comprises CDR1, CDR2 and CDR3 regions consisting of SEQ ID NOs: 53-55, respectively;
[0242] (xiv) an amino acid sequence which has at least 80%, at least 85%, at least 90%, at least 95%, at least 98%, at least 99%, or 100% identity to SEQ ID NO: 137, wherein the amino acid sequence comprises CDR1, CDR2 and CDR3 regions consisting of SEQ ID NOs: 14-16, respectively, and/or an amino acid sequence which has at least 80%, at least 85%, at least 90%, at least 95%, at least 98%, at least 99%, or 100% identity to SEQ ID NO: 163, wherein the amino acid sequence comprises CDR1, CDR2 and CDR3 regions consisting of SEQ ID NOs: 56-58, respectively;
[0243] (xv) an amino acid sequence which has at least 80%, at least 85%, at least 90%, at least 95%, at least 98%, at least 99%, or 100% identity to SEQ ID NO: 137, wherein the amino acid sequence comprises CDR1, CDR2 and CDR3 regions consisting of SEQ ID NOs: 14-16, respectively, and/or an amino acid sequence which has at least 80%, at least 85%, at least 90%, at least 95%, at least 98%, at least 99%, or 100% identity to SEQ ID NO: 164, wherein the amino acid sequence comprises CDR1, CDR2 and CDR3 regions consisting of SEQ ID NOs: 59-61, respectively;
[0244] (xvi) an amino acid sequence which has at least 80%, at least 85%, at least 90%, at least 95%, at least 98%, at least 99%, or 100% identity to SEQ ID NO: 138, wherein the amino acid sequence comprises CDR1, CDR2 and CDR3 regions consisting of SEQ ID NOs: 62-64, respectively, and/or an amino acid sequence which has at least 80%, at least 85%, at least 90%, at least 95%, at least 98%, at least 99%, or 100% identity to SEQ ID NO: 165, wherein the amino acid sequence comprises CDR1, CDR2 and CDR3 regions consisting of SEQ ID NOs: 98-100, respectively;
[0245] (xvii) an amino acid sequence which has at least 80%, at least 85%, at least 90%, at least 95%, at least 98%, at least 99%, or 100% identity to SEQ ID NO: 139, wherein the amino acid sequence comprises CDR1, CDR2 and CDR3 regions consisting of SEQ ID NOs: 65-67, respectively, and/or an amino acid sequence which has at least 80%, at least 85%, at least 90%, at least 95%, at least 98%, at least 99%, or 100% identity to SEQ ID NO: 166, wherein the amino acid sequence comprises CDR1, CDR2 and CDR3 regions consisting of SEQ ID NOs: 101-103, respectively;
[0246] (xviii) an amino acid sequence which has at least 80%, at least 85%, at least 90%, at least 95%, at least 98%, at least 99%, or 100% identity to SEQ ID NO: 140, wherein the amino acid sequence comprises CDR1, CDR2 and CDR3 regions consisting of SEQ ID NOs: 68-70, respectively, and/or an amino acid sequence which has at least 80%, at least 85%, at least 90%, at least 95%, at least 98%, at least 99%, or 100% identity to SEQ ID NO: 167, wherein the amino acid sequence comprises CDR1, CDR2 and CDR3 regions consisting of SEQ ID NOs: 104-106, respectively;
[0247] (xix) an amino acid sequence which has at least 80%, at least 85%, at least 90%, at least 95%, at least 98%, at least 99%, or 100% identity to SEQ ID NO: 141, wherein the amino acid sequence comprises CDR1, CDR2 and CDR3 regions consisting of SEQ ID NOs: 71-73, respectively, and/or an amino acid sequence which has at least 80%, at least 85%, at least 90%, at least 95%, at least 98%, at least 99%, or 100% identity to SEQ ID NO: 168, wherein the amino acid sequence comprises CDR1, CDR2 and CDR3 regions consisting of SEQ ID NOs: 107-109, respectively;
[0248] (xx) an amino acid sequence which has at least 80%, at least 85%, at least 90%, at least 95%, at least 98%, at least 99%, or 100% identity to SEQ ID NO: 142, wherein the amino acid sequence comprises CDR1, CDR2 and CDR3 regions consisting of SEQ ID NOs: 74-76, respectively, and/or an amino acid sequence which has at least 80%, at least 85%, at least 90%, at least 95%, at least 98%, at least 99%, or 100% identity to SEQ ID NO: 169, wherein the amino acid sequence comprises CDR1, CDR2 and CDR3 regions consisting of SEQ ID NOs: 110-112, respectively;
[0249] (xxi) an amino acid sequence which has at least 80%, at least 85%, at least 90%, at least 95%, at least 98%, at least 99%, or 100% identity to SEQ ID NO: 143, wherein the amino acid sequence comprises CDR1, CDR2 and CDR3 regions consisting of SEQ ID NOs: 77-79, respectively, and/or an amino acid sequence which has at least 80%, at least 85%, at least 90%, at least 95%, at least 98%, at least 99%, or 100% identity to SEQ ID NO: 170, wherein the amino acid sequence comprises CDR1, CDR2 and CDR3 regions consisting of SEQ ID NOs: 113-115, respectively;
[0250] (xxii) an amino acid sequence which has at least 80%, at least 85%, at least 90%, at least 95%, at least 98%, at least 99%, or 100% identity to SEQ ID NO: 144, wherein the amino acid sequence comprises CDR1, CDR2 and CDR3 regions consisting of SEQ ID NOs: 80-82, respectively, and/or an amino acid sequence which has at least 80%, at least 85%, at least 90%, at least 95%, at least 98%, at least 99%, or 100% identity to SEQ ID NO: 171, wherein the amino acid sequence comprises CDR1, CDR2 and CDR3 regions consisting of SEQ ID NOs: 116-118, respectively;
[0251] (xxiii) an amino acid sequence which has at least 80%, at least 85%, at least 90%, at least 95%, at least 98%, at least 99%, or 100% identity to SEQ ID NO: 145, wherein the amino acid sequence comprises CDR1, CDR2 and CDR3 regions consisting of SEQ ID NOs: 83-85, respectively, and/or an amino acid sequence which has at least 80%, at least 85%, at least 90%, at least 95%, at least 98%, at least 99%, or 100% identity to SEQ ID NO: 172, wherein the amino acid sequence comprises CDR1, CDR2 and CDR3 regions consisting of SEQ ID NOs: 119-121, respectively;
[0252] (xxiv) an amino acid sequence which has at least 80%, at least 85%, at least 90%, at least 95%, at least 98%, at least 99%, or 100% identity to SEQ ID NO: 146, wherein the amino acid sequence comprises CDR1, CDR2 and CDR3 regions consisting of SEQ ID NOs: 86-88, respectively, and/or an amino acid sequence which has at least 80%, at least 85%, at least 90%, at least 95%, at least 98%, at least 99%, or 100% identity to SEQ ID NO: 173, wherein the amino acid sequence comprises CDR1, CDR2 and CDR3 regions consisting of SEQ ID NOs: 122-124, respectively;
[0253] (xxv) an amino acid sequence which has at least 80%, at least 85%, at least 90%, at least 95%, at least 98%, at least 99%, or 100% identity to SEQ ID NO: 147, wherein the amino acid sequence comprises CDR1, CDR2 and CDR3 regions consisting of SEQ ID NOs: 89-91, respectively, and/or an amino acid sequence which has at least 80%, at least 85%, at least 90%, at least 95%, at least 98%, at least 99%, or 100% identity to SEQ ID NO: 174, wherein the amino acid sequence comprises CDR1, CDR2 and CDR3 regions consisting of SEQ ID NOs: 125-127, respectively;
[0254] (xxvi) an amino acid sequence which has at least 80%, at least 85%, at least 90%, at least 95%, at least 98%, at least 99%, or 100% identity to SEQ ID NO: 148, wherein the amino acid sequence comprises CDR1, CDR2 and CDR3 regions consisting of SEQ ID NOs: 92-94, respectively, and/or an amino acid sequence which has at least 80%, at least 85%, at least 90%, at least 95%, at least 98%, at least 99%, or 100% identity to SEQ ID NO: 175, wherein the amino acid sequence comprises CDR1, CDR2 and CDR3 regions consisting of SEQ ID NOs: 128-130, respectively; or
[0255] (xxvii) an amino acid sequence which has at least 80%, at least 85%, at least 90%, at least 95%, at least 98%, at least 99%, or 100% identity to SEQ ID NO: 149, wherein the amino acid sequence comprises CDR1, CDR2 and CDR3 regions consisting of SEQ ID NOs: 95-97, respectively, and/or an amino acid sequence which has at least 80%, at least 85%, at least 90%, at least 95%, at least 98%, at least 99%, or 100% identity to SEQ ID NO: 176, wherein the amino acid sequence comprises CDR1, CDR2 and CDR3 regions consisting of SEQ ID NOs: 131-133, respectively.

[0256] In some embodiments the antigen recognition domain comprises or consists of:
[0257] (i) an amino acid sequence which has at least 80%, at least 85%, at least 90%, at least 95%, at least 98%, at least 99%, or 100% identity to SEQ ID NO: 177, wherein the variable heavy domain comprises CDR1, CDR2 and CDR3 regions consisting of SEQ ID NOs: 5-7, respectively, and wherein the variable light domain comprises CDR1, CDR2 and CDR3 regions consisting of SEQ ID NOs: 17-19, respectively;
[0258] (ii) an amino acid sequence which has at least 80%, at least 85%, at least 90%, at least 95%, at least 98%, at least 99%, or 100% identity to SEQ ID NO: 178, wherein the variable heavy domain comprises CDR1, CDR2 and CDR3 regions consisting of SEQ ID NOs: 8-10, respectively, and wherein the variable light domain comprises CDR1, CDR2 and CDR3 regions consisting of SEQ ID NOs: 20-22, respectively;
[0259] (iii) an amino acid sequence which has at least 80%, at least 85%, at least 90%, at least 95%, at least 98%, at least 99%, or 100% identity to SEQ ID NO: 179, wherein the variable heavy domain comprises CDR1, CDR2 and CDR3 regions consisting of SEQ ID NOs: 11-13, respectively, and wherein the variable light domain comprises CDR1, CDR2 and CDR3 regions consisting of SEQ ID NOs: 23-25, respectively;
[0260] (iv) an amino acid sequence which has at least 80%, at least 85%, at least 90%, at least 95%, at least 98%, at least 99%, or 100% identity to SEQ ID NO: 180, wherein the variable heavy domain comprises CDR1, CDR2 and CDR3 regions consisting of SEQ ID NOs: 14-16, respectively, and wherein the variable light domain comprises CDR1, CDR2 and CDR3 regions consisting of SEQ ID NOs: 26-28, respectively;
[0261] (v) an amino acid sequence which has at least 80%, at least 85%, at least 90%, at least 95%, at least 98%, at least 99%, or 100% identity to SEQ ID NO: 181, wherein the variable heavy domain comprises CDR1, CDR2 and CDR3 regions consisting of SEQ ID NOs: 14-16, respectively, and wherein the variable light domain comprises CDR1, CDR2 and CDR3 regions consisting of SEQ ID NOs: 29-31, respectively;
[0262] (vi) an amino acid sequence which has at least 80%, at least 85%, at least 90%, at least 95%, at least 98%, at least 99%, or 100% identity to SEQ ID NO: 182, wherein the variable heavy domain comprises CDR1, CDR2 and CDR3 regions consisting of SEQ ID NOs: 14-16, respectively, and wherein the variable light domain comprises CDR1, CDR2 and CDR3 regions consisting of SEQ ID NOs: 32-34, respectively;
[0263] (vii) an amino acid sequence which has at least 80%, at least 85%, at least 90%, at least 95%, at least 98%, at least 99%, or 100% identity to SEQ ID NO: 183, wherein the variable heavy domain comprises CDR1, CDR2 and CDR3 regions consisting of SEQ ID NOs: 14-16, respectively, and wherein the variable light domain comprises CDR1, CDR2 and CDR3 regions consisting of SEQ ID NOs: 35-37, respectively;
[0264] (viii) an amino acid sequence which has at least 80%, at least 85%, at least 90%, at least 95%, at least 98%, at least 99%, or 100% identity to SEQ ID NO: 184, wherein the variable heavy domain comprises CDR1, CDR2 and CDR3 regions consisting of SEQ ID NOs: 14-16, respectively, and wherein the variable light domain comprises CDR1, CDR2 and CDR3 regions consisting of SEQ ID NOs: 38-40, respectively;
[0265] (ix) an amino acid sequence which has at least 80%, at least 85%, at least 90%, at least 95%, at least 98%, at least 99%, or 100% identity to SEQ ID NO: 185, wherein the variable heavy domain comprises CDR1, CDR2 and CDR3 regions consisting of SEQ ID NOs: 14-16, respectively, and wherein the variable light domain comprises CDR1, CDR2 and CDR3 regions consisting of SEQ ID NOs: 41-43, respectively;
[0266] (x) an amino acid sequence which has at least 80%, at least 85%, at least 90%, at least 95%, at least 98%, at least 99%, or 100% identity to SEQ ID NO: 186, wherein the variable heavy domain comprises CDR1, CDR2 and CDR3 regions consisting of SEQ ID NOs: 14-16, respectively, and wherein the variable light domain comprises CDR1, CDR2 and CDR3 regions consisting of SEQ ID NOs: 44-46, respectively;
[0267] (xi) an amino acid sequence which has at least 80%, at least 85%, at least 90%, at least 95%, at least 98%, at least 99%, or 100% identity to SEQ ID NO: 187, wherein the variable heavy domain comprises CDR1, CDR2 and CDR3 regions consisting of SEQ ID NOs: 14-16, respectively, and wherein the variable light domain comprises CDR1, CDR2 and CDR3 regions consisting of SEQ ID NOs: 47-49, respectively;
[0268] (xii) an amino acid sequence which has at least 80%, at least 85%, at least 90%, at least 95%, at least 98%, at least 99%, or 100% identity to SEQ ID NO: 188, wherein the variable heavy domain comprises CDR1, CDR2 and CDR3 regions consisting of SEQ ID NOs: 14-16, respectively, and wherein the variable light domain comprises CDR1, CDR2 and CDR3 regions consisting of SEQ ID NOs: 50-52, respectively;
[0269] (xiii) an amino acid sequence which has at least 80%, at least 85%, at least 90%, at least 95%, at least 98%, at least 99%, or 100% identity to SEQ ID NO: 189, wherein the variable heavy domain comprises CDR1, CDR2 and CDR3 regions consisting of SEQ ID NOs: 14-16, respectively, and wherein the variable light domain comprises CDR1, CDR2 and CDR3 regions consisting of SEQ ID NOs: 53-55, respectively;
[0270] (xiv) an amino acid sequence which has at least 80%, at least 85%, at least 90%, at least 95%, at least 98%, at least 99%, or 100% identity to SEQ ID NO: 190, wherein the variable heavy domain comprises CDR1, CDR2 and CDR3 regions consisting of SEQ ID NOs: 14-16, respectively, and wherein the variable light domain comprises CDR1, CDR2 and CDR3 regions consisting of SEQ ID NOs: 56-58, respectively;
[0271] (xv) an amino acid sequence which has at least 80%, at least 85%, at least 90%, at least 95%, at least 98%, at least 99%, or 100% identity to SEQ ID NO: 191, wherein the variable heavy domain comprises CDR1, CDR2 and CDR3 regions consisting of SEQ ID NOs: 14-16, respectively, and wherein the variable light domain comprises CDR1, CDR2 and CDR3 regions consisting of SEQ ID NOs: 59-61, respectively;
[0272] (xvi) an amino acid sequence which has at least 80%, at least 85%, at least 90%, at least 95%, at least 98%, at least 99%, or 100% identity to SEQ ID NO: 192, wherein the variable heavy domain comprises CDR1, CDR2 and CDR3 regions consisting of SEQ ID NOs: 62-64, respectively, and wherein the variable light domain comprises CDR1, CDR2 and CDR3 regions consisting of SEQ ID NOs: 98-100, respectively;
[0273] (xvii) an amino acid sequence which has at least 80%, at least 85%, at least 90%, at least 95%, at least 98%, at least 99%, or 100% identity to SEQ ID NO: 193, wherein the variable heavy domain comprises CDR1, CDR2 and CDR3 regions consisting of SEQ ID NOs: 65-67, respectively, and wherein the variable light domain comprises CDR1, CDR2 and CDR3 regions consisting of SEQ ID NOs: 101-103, respectively;
[0274] (xviii) an amino acid sequence which has at least 80%, at least 85%, at least 90%, at least 95%, at least 98%, at least 99%, or 100% identity to SEQ ID NO: 194, wherein the variable heavy domain comprises CDR1, CDR2 and CDR3 regions consisting of SEQ ID NOs: 68-70, respectively, and wherein the variable light domain comprises CDR1, CDR2 and CDR3 regions consisting of SEQ ID NOs: 104-106, respectively;
[0275] (xix) an amino acid sequence which has at least 80%, at least 85%, at least 90%, at least 95%, at least 98%, at least 99%, or 100% identity to SEQ ID NO: 195, wherein the variable heavy domain comprises CDR1, CDR2 and CDR3 regions consisting of SEQ ID NOs: 71-73, respectively, and wherein the variable light domain comprises CDR1, CDR2 and CDR3 regions consisting of SEQ ID NOs: 107-109, respectively;
[0276] (xx) an amino acid sequence which has at least 80%, at least 85%, at least 90%, at least 95%, at least 98%, at least 99%, or 100% identity to SEQ ID NO: 196, wherein the variable heavy domain comprises CDR1, CDR2 and CDR3 regions consisting of SEQ ID NOs: 74-76, respectively, and wherein the variable light domain comprises CDR1, CDR2 and CDR3 regions consisting of SEQ ID NOs: 110-112, respectively;
[0277] (xxi) an amino acid sequence which has at least 80%, at least 85%, at least 90%, at least 95%, at least 98%, at least 99%, or 100% identity to SEQ ID NO: 197, wherein the variable heavy domain comprises CDR1, CDR2 and CDR3 regions consisting of SEQ ID NOs: 77-79, respectively, and wherein the variable light domain comprises CDR1, CDR2 and CDR3 regions consisting of SEQ ID NOs: 113-115, respectively;
[0278] (xxii) an amino acid sequence which has at least 80%, at least 85%, at least 90%, at least 95%, at least 98%, at least 99%, or 100% identity to SEQ ID NO: 198, wherein the variable heavy domain comprises CDR1, CDR2 and CDR3 regions consisting of SEQ ID NOs: 80-82, respectively, and wherein the variable light domain comprises CDR1, CDR2 and CDR3 regions consisting of SEQ ID NOs: 116-118, respectively;
[0279] (xxiii) an amino acid sequence which has at least 80%, at least 85%, at least 90%, at least 95%, at least 98%, at least 99%, or 100% identity to SEQ ID NO: 199, wherein the variable heavy domain comprises CDR1, CDR2 and CDR3 regions consisting of SEQ ID NOs: 83-85, respectively, and wherein the variable light domain comprises CDR1, CDR2 and CDR3 regions consisting of SEQ ID NOs: 119-121, respectively;
[0280] (xxiv) an amino acid sequence which has at least 80%, at least 85%, at least 90%, at least 95%, at least 98%, at least 99%, or 100% identity to SEQ ID NO: 200, wherein the variable heavy domain comprises CDR1, CDR2 and CDR3 regions consisting of SEQ ID NOs: 86-88, respectively, and wherein the variable light domain comprises CDR1, CDR2 and CDR3 regions consisting of SEQ ID NOs: 122-124, respectively;
[0281] (xxv) an amino acid sequence which has at least 80%, at least 85%, at least 90%, at least 95%, at least 98%, at least 99%, or 100% identity to SEQ ID NO: 201, wherein the variable heavy domain comprises CDR1, CDR2 and CDR3 regions consisting of SEQ ID NOs: 89-91, respectively, and wherein the variable light domain comprises CDR1, CDR2 and CDR3 regions consisting of SEQ ID NOs: 125-127, respectively;
[0282] (xxvi) an amino acid sequence which has at least 80%, at least 85%, at least 90%, at least 95%, at least 98%, at least 99%, or 100% identity to SEQ ID NO: 202, wherein the variable heavy domain comprises CDR1, CDR2 and CDR3 regions consisting of SEQ ID NOs: 92-94, respectively, and wherein the variable light domain comprises CDR1, CDR2 and CDR3 regions consisting of SEQ ID NOs: 128-130, respectively; or (xxvii) an amino acid sequence which has at least 80%, at least 85%, at least 90%, at least 95%, at least 98%, at least 99%, or 100% identity to SEQ ID NO: 203, wherein the variable heavy domain comprises CDR1, CDR2 and CDR3 regions consisting of SEQ ID NOs: 95-97, respectively, and wherein the variable light domain comprises CDR1, CDR2 and CDR3 regions consisting of SEQ ID NOs: 131-133, respectively.

[0283] Hinge Domain

[0284] The CAR may comprise a hinge domain.

[0285] The “hinge domain”, also referred to as the “spacer domain”, as used herein refers to the extracellular part of the CAR that separates the antigen binding domain from the transmembrane domain. The hinge may provide flexibility to access the targeted antigen. For example, long spacers provide extra flexibility to the CAR and allow for better access to membrane-proximal epitopes

[0286] Suitable hinge domains will be apparent to those of skill in the art (e.g. Guedan, S., et al., 2018. Molecular Therapy-Methods & Clinical Development, 12, 145-156). Suitable hinge domains include, but are not limited to: CD28 hinge domain, a CD8 hinge domain, an IgG hinge domain, and an IgD hinge domain. Preferably the hinge domain is a CD8 or CD28 hinge domain.

[0287] Most preferably, the hinge domain is a CD8 hinge domain. Suitably, the hinge domain may comprise the amino acid sequence shown as SEQ ID NO: 222, or a variant which is at least 80% identical to SEQ ID NO: 222.

Illustrative CD8 hinge domain (SEQ ID NO: 222):
TTTPAPRPPTPAPTIASQPLSLRPEACRPAAGGAVHTRGLDFACD

[0288] Suitably, the variant may be at least 85%, at least 90%, at least 95%, at least 97%, at least 98% or at least 99% identical to SEQ ID NO: 222.

[0289] Suitably the hinge domain is a CD28 hinge domain. Suitably, the hinge domain may comprise the amino acid sequence shown as SEQ ID NO: 221, or a variant which is at least 80% identical to SEQ ID NO: 221.

Illustrative CD28 hinge domain (SEQ ID NO: 221):
IEVMYPPPYLDNEKSNGTIIHVKGKHLCPSPLFPGPSKP

[0290] Suitably, the variant may be at least 85%, at least 90%, at least 95%, at least 97%, at least 98% or at least 99% identical to SEQ ID NO: 221.

[0291] Suitably, the CAR may encode a tag, such as a c-Myc tag (EQKLISEEDL—SEQ ID NO: 223). Suitably the tag may be incorporated into the extracellular domain of the CAR, for example in the hinge domain of the extracellular domain. An illustrative CD28 hinge domain with an integrated c-Myc tag is shown below. Suitably, the hinge domain may comprise the amino acid sequence shown as SEQ ID NO: 224, or a variant which is at least 80% identical to SEQ ID NO: 224.

Illustrative CD28 hinge domain with an integrated
c-Myc tag (SEQ ID NO: 224):
IEVEQKLISEEDLLDNEKSNGTIIHVKGKHLCPSPLFPGPSKP

[0292] Suitably, the variant may be at least 85%, at least 90%, at least 95%, at least 97%, at least 98% or at least 99% identical to SEQ ID NO: 224.

[0293] Transmembrane Domain

[0294] The CAR may comprise a transmembrane domain.

[0295] The “transmembrane domain” as used herein refers to the part of the CAR that anchors the CAR into the cell membrane of the Treg. Thus, the transmembrane domain is capable of spanning or being present within the cell membrane of the Treg. The transmembrane domain may be derived from a protein comprising an extracellular and/or intracellular portions and thus the transmembrane domain as used herein may be attached to extracellular and/or intracellular residues derived from the protein of origin, in addition to the portion within or spanning the cell membrane. For example, the transmembrane domain may be attached to a hinge domain derived from the protein of origin e.g. a transmembrane domain derived from CD8 may be attached to a hinge domain derived from CD8. Further, a transmembrane domain derived from CD8 or CD28 for example, may be attached to a CD8 or CD28 costimulatory domain. It will be appreciated by a skilled person that the transmembrane domain can also be synthetic, e.g. de novo designed and not derived from a protein having a transmembrane domain. The presence of a transmembrane domain within a cell membrane can be assessed using any suitable method known in the art, including fluorescence labelling with fluorescence microscopy.

[0296] Suitable transmembrane domains will be apparent to those of skill in the art. The transmembrane domain may comprise the transmembrane sequence from any protein which has a transmembrane domain, including any of the type I, type II or type III transmembrane proteins. The transmembrane domain of the CAR may also comprise an artificial hydrophobic sequence. The transmembrane domain may be selected so as not to dimerize.

[0297] Examples of transmembrane (TM) domains used in CAR constructs are: 1) The CD28 TM domain (Pule et al, Mol Ther, 2005, November; 12(5):933-41; Brentjens et al, CCR, 2007, Sep. 15; 13 (18 Pt 1):5426-35; Casucci et al, Blood, 2013, Nov. 14; 122(20):3461-72.); 2) The OX40 TM domain (Pule et al, Mol Ther, 2005, November; 12(5):933-41); 3) The 41BB TM domain (Brentjens et al, CCR, 2007, Sep. 15; 13 (18 Pt 1):5426-35); 4) The CD3 zeta TM domain (Pule et al, Mol Ther, 2005, November; 12(5):933-41; Savoldo B, Blood, 2009, Jun. 18; 113(25):6392-402.); 5) The CD8 alpha TM domain (Maher et al, Nat Biotechnol, 2002, January; 20(1):70-5.; Imai C, Leukemia, 2004, April; 18(4):676-84; Brentjens et al, CCR, 2007, Sep. 15; 13 (18 Pt 1):5426-35; Milone et al, Mol Ther, 2009, August; 17(8):1453-64.); 6) the ICOS TM domain; 7) the CD4 TM domain.

[0298] Most preferably, the CAR may comprise a CD8 transmembrane domain. Suitably, the transmembrane domain may comprise the amino acid sequence shown as SEQ ID NO: 225, or a variant which is at least 80% identical to SEQ ID NO: 225.

Illustrative CD8 TM domain (AA 183 to 203) (SEQ
ID NO: 225):
IYIWAPLAGTCGVLLLSLVIT

[0299] Suitably, the variant may be at least 85%, at least 90%, at least 95%, at least 97%, at least 98% or at least 99% identical to SEQ ID NO: 225.

[0300] Most preferably, the CAR may comprise a CD8 hinge domain and a CD8 transmembrane domain. Suitably, the hinge and transmembrane domain may comprise the amino acid sequence shown as SEQ ID NO: 226, or a variant which is at least 80% identical to SEQ ID NO: 226.

Illustrative CD8 hinge domain and CD8 transmem-
brane domain (SEQ ID NO: 226):
TTTPAPRPPTPAPTIASQPLSLRPEACRPAAGGAVHTRGLDFACDIYIWA
PLAGTCGVLLLSLVIT

[0301] Suitably, the variant may be at least 85%, at least 90%, at least 95%, at least 97%, at least 98% or at least 99% identical to SEQ ID NO: 226.

[0302] Suitably, the CAR may comprise a CD28 hinge domain and a CD8 transmembrane domain. Suitably, the hinge and transmembrane domain may comprise the amino acid sequence shown as SEQ ID NO: 227, or a variant which is at least 80% identical to SEQ ID NO: 227.

Illustrative CD28 hinge domain and CD8
transmembrane domain (SEQ ID NO: 227):
IEVMYPPPYLDNEKSNGTIIHVKGKHLCPSPLFPGPSKPIYIWAPLAGT
CGVLLLSLVIT

[0303] Suitably, the variant may be at least 85%, at least 90%, at least 95%, at least 97%, at least 98% or at least 99% identical to SEQ ID NO: 227.

[0304] Suitably, the CAR may comprise the CD28 transmembrane domain. Suitably, the transmembrane domain may comprise the amino acid sequence shown as SEQ ID NO: 228, or a variant which is at least 80% identical to SEQ ID NO: 228.

Illustrative CD28 TMdomain (AA 153 to 179) (SEQ
ID NO: 228):
FWVLVVVGGVLACYSLLVTVAFIIFWV

[0305] Suitably, the variant may be at least 85%, at least 90%, at least 95%, at least 97%, at least 98% or at least 99% identical to SEQ ID NO: 228.

[0306] It will be appreciated by a skilled person that a variant of a transmembrane domain, must still be capable of being present across or spanning the cell membrane, i.e. of being a transmembrane domain.

[0307] Endodomain

[0308] The CAR may comprise an endodomain comprising one or more intracellular signalling domains and optionally one or more co-stimulatory domains.

[0309] The CAR may comprise one or more intracellular signalling domains.

[0310] The “intracellular signalling domain” as used herein refers to the intracellular part of the CAR that participates in transducing the message of the effective CAR binding to a HLA (preferably HLA-A2) into the interior of the Treg to elicit Treg function, e.g. immunosuppressive function.

[0311] Suitable intracellular signalling domains will be apparent to those of skill in the art. The intracellular signalling domain is necessary to transduce the effector function signal and direct the Treg to perform its specialized function upon antigen binding. Examples of intracellular signalling domains include, but are not limited to, ζ chain of the T-cell receptor or any of its homologs (e.g., η chain, FcεR1γ and β chains, MB1 (Iga) chain, B29 (Igβ) chain, etc.), CD3 polypeptides (Δ, δ and ε), syk family tyrosine kinases (Syk, ZAP 70, etc.), src family tyrosine kinases (Lck, Fyn, Lyn, etc.) and other molecules involved in T-cell transduction, such as CD2, CD5 and CD28 or their signalling domains. The intracellular signalling domain may be human CD3 zeta signalling domain, FcγRIII, FcsRI, cytoplasmic tails of Fc receptors, immunoreceptor tyrosine-based activation motif (ITAM) bearing cytoplasmic receptors or combinations thereof.

[0312] Most preferably, the intracellular signalling domain may comprise the intracellular signalling domain of human CD3 zeta signalling domain. Suitably, the intracellular signalling domain may comprise the amino acid sequence shown as SEQ ID NO: 229, or a variant which is at least 80% identical to SEQ ID NO: 229.

Illustrative CD3 zeta signalling domain (SEQ ID
NO: 229):
RVKFSRSADAPAYQQGQNQLYNELNLGRREEYDVLDKRRGRDPEMGGKP
RRKNPQEGLYNELQKDKMAEAYSEIGMKGERRRGKGHDGLYQGLSTATK
DTYDALHMQALPPR

[0313] Suitably, the variant may be at least 85%, at least 90%, at least 95%, at least 97%, at least 98% or at least 99% identical to SEQ ID NO: 229.

[0314] The intracellular signalling domain of the CAR may comprise the CD28 signalling domain. Suitably, the intracellular signalling domain may comprise the amino acid sequence shown as SEQ ID NO: 230, or a variant which is at least 80% identical to SEQ ID NO: 230.

Illustrative CD28 signalling domain (SEQ ID
NO: 230):
RSKRSRLLHSDYMNMTPRRPGPTRKHYQPYAPPRDFAAYRS

[0315] Suitably, the variant may be at least 85%, at least 90%, at least 95%, at least 97%, at least 98% or at least 99% identical to SEQ ID NO: 230.

[0316] The intracellular signalling domain of the CAR may comprise the CD27 signalling domain. Suitably, the intracellular signalling domain may comprise the amino acid sequence shown as SEQ ID NO: 231, or a variant which is at least 80% identical to SEQ ID NO: 231.

Illustrative CD27 signalling domain (SEQ ID
NO: 231):
QRRKYRSNKGESPVEPAEPCHYSCPREEEGSTIPIQEDYRKPEPACSP

[0317] In one embodiment, the intracellular signalling domain comprises a signalling motif which has at least 85%, at least 90%, at least 95%, at least 97%, at least 98% or at least 99% identity to SEQ ID NO: 231.

[0318] Additional intracellular signalling domains will be apparent to those of skill in the art and may be used in connection with alternate embodiments of the invention.

[0319] The CAR may also comprise one or more co-stimulatory domains.

[0320] A “co-stimulatory domain” as used herein refers to an intracellular part of the CAR that may promote Treg function (e.g. immunosuppressive function), expansion, and/or persistence.

[0321] Accordingly, the CAR may comprise a compound endodomain comprising a fusion of the one or more co-stimulatory domains to that of an intracellular signalling domain e.g. CD3. Such a compound endodomain may be referred to as a second generation CAR which can transmit an activating and co-stimulatory signal simultaneously after antigen recognition. The co-stimulatory domain most commonly used is that of CD28. This supplies the most potent co-stimulatory signal—namely immunological signal 2, which triggers Treg proliferation. Suitable co-stimulatory domains will be apparent to those of skill in the art.

[0322] Accordingly, the CAR preferably comprises a CD28 co-stimulatory domain. Suitably, the one or more co-stimulatory domains may comprise the amino acid sequence shown as SEQ ID NO: 230 or a variant which is at least 80% (e.g. at least 85%, at least 90%, at least 95%, at least 97%, at least 98% or at least 99%) identical to SEQ ID NO: 230.

[0323] Suitably, the one or more co-stimulatory domains may comprise the amino acid sequence shown as SEQ ID NO: 231, or a variant which is at least 80% (e.g. at least 85%, at least 90%, at least 95%, at least 97%, at least 98% or at least 99%) identical to SEQ ID NO: 231.

[0324] Suitably, the one or more co-stimulatory domains may comprise one or more TNF receptor family signalling domain, such as the signalling domain of OX40, 4-1 BB, ICOS or TNFRSF25.

[0325] Illustrative sequences for OX40, 4-1 BB, ICOS and TNFRSF25 signalling domains are shown below. The one or more co-stimulatory domains may comprise one or more of SEQ ID NOs: 232-235 or a variant which is at least 80% identical to one or more of SEQ ID NOs: 232-235.

Illustrative OX40 signalling domain (SEQ ID
NO: 232):
ALYLLRRDQRLPPDAHKPPGGGSFRTPIQEEQADAHSTLAKI
Illustrative 41BB signalling domain (SEQ ID
NO: 233):
KRGRKKLLYIFKQPFMRPVQTTQEEDGCSCRFPEEEEGGCEL
Illustrative ICOS signalling domain (SEQ ID
NO: 234):
CWLTKKKYSSSVHDPNGEYMFMRAVNTAKKSRLTDVTL
Illustrative TNFRSF25 signalling domain (SEQ ID
NO: 235):
TYTYRHCWPHKPLVTADEAGMEALTPPPATHLSPLDSAHTLLAPPDSSE
KICTVQLVGNSWTPGYPETQEALCPQVTWSWDQLPSRALGPAAAPTLSP
ESPAGSPAMMLQPGPQLYDVMDAVPARRWKEFVRTLGLREAEIEAVEVE
IGRFRDQQYEMLKRWRQQQPAGLGAVYAALERMGLDGCVEDLRSRLQRG
P

[0326] The one or more co-stimulatory domains may comprise a variant of one or more of OX40, 4-1 BB, ICOS and TNFRSF25 signalling domains which has at least 85%, at least 90%, at least 95%, at least 97%, at least 98% or at least 99% identity to any one of SEQ ID NOs: 232-235.

[0327] The endodomain of the CAR may comprise the CD28 signalling domain and the CD3 zeta signalling domain. Suitably, the endodomain may comprise the amino acid sequence shown as SEQ ID NO: 236, or a variant which is at least 80% identical to SEQ ID NO: 236.

Illustrative CD28 signalling domain and CD3 zeta
signalling domain (SEQ ID NO: 236):
RSKRSRLLHSDYMNMTPRRPGPTRKHYQPYAPPRDFAAYRSRVKFSRSA
DAPAYQQGQNQLYNELNLGRREEYDVLDKRRGRDPEMGGKPRRKNPQEG
LYNELQKDKMAEAYSEIGMKGERRRGKGHDGLYQGLSTATKDTYDALHM
QALPPR

[0328] The endodomain may comprise a variant which is at least 85%, at least 90%, at least 95%, at least 97%, at least 98% or at least 99% identical to SEQ ID NO: 236.

[0329] A variant of an intracellular signalling domain and/or of a costimulatory domain may have the same or similar function to the comparative wildtype intracellular signalling domain and/or costimulatory domain, e.g. may have at least 40, 50, 60, 70, 80, 90, 95, 100, 110, 120, 130, 140 or 150% of the function of the wildtype domain (e.g. of the signalling ability of the wildtype domain).

[0330] Other Domains

[0331] In some embodiments the CAR comprises one or more signal peptides.

[0332] The CAR may comprise a leader sequence which targets it to the endoplasmic reticulum pathway for expression on the cell surface. An illustrative leader sequence is a CD8 leader sequence. Illustrative leader sequences are shown below as SEQ ID NO: 237 and SEQ ID NO: 241.

Illustrative CD8 leader (SEQ ID NO: 237):
MALPVTALLLPLALLLHAARP
Illustrative leader sequence (SEQ ID NO: 241):
MALPVTALLLPLALLLHAAAP

[0333] The leader sequence may comprise or consist of a variant which is at least 80%, at least 85%, at least 90%, at least 95%, at least 97%, at least 98% or at least 99% identical to SEQ ID NO: 237 or SEQ ID NO: 241.

[0334] In some embodiments the CAR comprise one or more reporter domains, optionally in combination with a self-cleaving or cleavage domain.

[0335] Suitable reporter domains are well known in the art and include, but are not limited to, fluorescent proteins—such as GFP. The use of a reporter domain is advantageous as it allows a Treg in which a polynucleotide or vector of the present invention has been successfully introduced (such that the encoded CAR is expressed) to be selected and isolated from a starting cell population using common methods, e.g. flow cytometry. Suitably, the reporter domain may be a luciferase-based reporter, a PET reporter (e.g. Sodium Iodide Symporter (NIS)), or a membrane protein (e.g. CD34, low-affinity nerve growth factor receptor (LNGFR)).

[0336] The nucleic acid sequences encoding the CAR and the reporter domain may be separated by a co-expression site which enables expression of each polypeptide as a discrete entity. Suitable co-expression sites are known in the art and include, for example, internal ribosome entry sites (IRES) and self-cleaving peptides. Suitable self-cleaving or cleavage domains include, but are not limited to P2A peptide, T2A peptide, E2A peptide, F2A peptide, and furin site.

[0337] Illustrative CAR Constructs

[0338] Illustrative CAR constructs for use in the present invention are shown below. The CAR may comprise a sequence which has at least 80% (e.g. at least 85%, at least 90%, at least 95%, at least 97%, at least 98%, at least 99% or 100%) identity to one of SEQ ID NOs: 209 or 210. Preferably any such variant has at least partial functionality as compared to SEQ ID NO: 209 or 210. For example, the variant may have at least 10%, at least 20%, at least 30%, at least 40%, at least 50%, at least 60%, at least 70%, at least 80%, or at least 90% of the function of an amino acid sequence shown as one of SEQ ID NO: 209 or 210. The variant may have functionality similar to or the same level as one of SEQ ID NO: 209 or 210 or may have functionality of a greater level than an amino acid sequence shown as one of SEQ ID NO: 209 or 210 (e.g. increased by at least 10%, at least 20%, at least 30%, at least 40% or at least 50%).

CD8 hinge-CD8 TM domain-CD28 signalling
domain-CD3 zeta signalling domain (SEQ ID
NO: 209):
TTTPAPRPPTPAPTIASQPLSLRPEACRPAAGGAVHTRGLDFACDI
YIWAPLAGTCGVLLLSLVITRSKRSRLLHSDYMNMTPRRPGPTRKH
YQPYAPPRDFAAYRSRVKFSRSADAPAYQQGQNQLYNELNLGRREE
YDVLDKRRGRDPEMGGKPRRKNPQEGLYNELQKDKMAEAYSEIGMK
GERRRGKGHDGLYQGLSTATKDTYDALHMQALPPR
CD28 hinge-CD8 TM domain-CD28 signalling
domain-CD3 zeta signalling domain (SEQ ID
NO: 210):
IEVMYPPPYLDNEKSNGTIIHVKGKHLCPSPLFPGPSKPIYIWAPL
AGTCGVLLLSLVITRSKRSRLLHSDYMNMTPRRPGPTRKHYQPYAP
PRDFAAYRSRVKFSRSADAPAYQQGQNQLYNELNLGRREEYDVLDK
RRGRDPEMGGKPRRKNPQEGLYNELQKDKMAEAYSEIGMKGERRRG
KGHDGLYQGLSTATKDTYDALHMQALPPR

[0339] Particularly, SEQ ID NO. 209 or a variant thereof may be used in conjunction with an antigen binding domain comprising: (i) SEQ ID NOs: 8-10 and SEQ ID NOs: 20-22 or derivatives thereof; (ii) SEQ ID NOs: 11-13 and SEQ ID NOs: 23-25 or derivatives thereof; or (iii) SEQ ID NOs: 14-16 and SEQ ID NOs: 26-28, or derivatives thereof.

[0340] A vector of the invention may particularly comprise a CAR comprising the domains as shown in the below table.

| Antigen binding domain | Hinge and TM | | Intracellular |
|---|---|---|---|
| comprising CDR SEQ ID Nos: | domains | Costimulatory domain | signalling domain |
| SEQ ID Nos 8-10 and 20-22; | CD8 | CD28 | CD3zeta |
| SEQ ID Nos 11-13 and 23-25; or | | | |
| SEQ ID Nos 14-16 and 26-28 | | | |
| SEQ ID Nos 8-10 and 20-22; | CD8 | CD28; and | CD3zeta |
| SEQ ID Nos 11-13 and 23-25; or | | OX40 or 41BB | |
| SEQ ID Nos 14-16 and 26-28 | | | |
| SEQ ID Nos 8-10 and 20-22; | CD28 | CD28 | CD3zeta |
| SEQ ID Nos 11-13 and 23-25; or | | | |
| SEQ ID Nos 14-16 and 26-28 | | | |
| SEQ ID Nos 8-10 and 20-22; | CD28 | CD28; and | CD3zeta |
| SEQ ID Nos 11-13 and 23-25; or | | OX40 or 41BB | |
| SEQ ID Nos 14-16 and 26-28 | | | |

[0341] Illustrative polynucleotide sequences encoding SEQ ID NO: 209 and SEQ ID NO: 210 are shown below. The polynucleotide encoding a HLA-A-specific CAR may comprise a sequence which has at least 70% (e.g. at least 75%, at least 80%, at least 85%, at least 90%, at least 95%, at least 97%, at least 98%, at least 99% or 100%) identity to SEQ ID NO: 211 or SEQ ID NO: 212. Preferably any such variant encodes a HLA-specific CAR that has at least partial functionality as compared to SEQ ID NOs: 209 or 210. For example, the HLA-specific CAR encoded by the variant may have at least 10%, at least 20%, at least 30%, at least 40%, at least 50%, at least 60%, at least 70%, at least 80%, or at least 90% of the function of an amino acid sequence shown as SEQ ID NO: 209 or 210. The HLA-specific CAR encoded by the variant may have functionality similar to or the same level as one of SEQ ID NO: 209 or 210 or may have functionality of a greater level than an amino acid sequence shown as one of SEQ ID NO: 209 or 210 (e.g. increased by at least 10%, at least 20%, at least 30%, at least 40% or at least 50%).

Illustrative polynucleotide encoding SEQ ID NO: 209
(SEQ ID NO: 211)
ACCACCACCCCCGCCCCCCGCCCCCCCACCCCCGCCCCCACCATCGCCAG
CCAGCCCCTGAGCCTGCGCCCCGAGGCCTGCCGCCCCGCCGCCGGCGGCG
CCGTGCACACCCGCGGCCTGGACTTCGCCTGCGACATCTACATCTGGGCC
CCCCTGGCCGGCACCTGCGGCGTGCTGCTGCTGAGCCTGGTGATCACCCG
CAGCAAGCGCAGCCGCCTGCTGCACAGCGACTACATGAACATGACCCCCC
GCCGCCCCGGCCCCACCCGCAAGCACTACCAGCCCTACGCCCCCCCCCGC
GACTTCGCCGCCTACCGCAGCCGCGTGAAGTTCAGCCGCAGCGCCGACGC
CCCCGCCTACCAGCAGGGCCAGAACCAGCTGTACAACGAGCTGAACCTGG
GCCGCCGCGAGGAGTACGACGTGCTGGACAAGCGCCGCGGCCGCGACCCC
GAGATGGGCGGCAAGCCCCGCCGCAAGAACCCCCAGGAGGGCCTGTACAA
CGAGCTGCAGAAGGACAAGATGGCCGAGGCCTACAGCGAGATCGGCATGA
AGGGCGAGCGCCGCCGCGGCAAGGGCCACGACGGCCTGTACCAGGGCCTG
AGCACCGCCACCAAGGACACCTACGACGCCCTGCACATGCAGGCCCTGCC
CCCCCGC
Illustrative polynucleotide encoding SEQ ID NO: 210
(SEQ ID NO: 212)
ATCGAGGTGATGTACCCCCCCCCCTACCTGGACAACGAGAAGAGCAACGG
CACCATCATCCACGTGAAGGGCAAGCACCTGTGCCCCAGCCCCCTGTTCC
CCGGCCCCAGCAAGCCCATCTACATCTGGGCCCCCCTGGCCGGCACCTGC
GGCGTGCTGCTGCTGAGCCTGGTGATCACCCGCAGCAAGCGCAGCCGCCT
GCTGCACAGCGACTACATGAACATGACCCCCCGCCGCCCCGGCCCCACCC
GCAAGCACTACCAGCCCTACGCCCCCCCCCGCGACTTCGCCGCCTACCGC
AGCCGCGTGAAGTTCAGCCGCAGCGCCGACGCCCCCGCCTACCAGCAGGG
CCAGAACCAGCTGTACAACGAGCTGAACCTGGGCCGCCGCGAGGAGTACG
ACGTGCTGGACAAGCGCCGCGGCCGCGACCCCGAGATGGGCGGCAAGCCC
CGCCGCAAGAACCCCCAGGAGGGCCTGTACAACGAGCTGCAGAAGGACAA
GATGGCCGAGGCCTACAGCGAGATCGGCATGAAGGGCGAGCGCCGCCGCG
GCAAGGGCCACGACGGCCTGTACCAGGGCCTGAGCACCGCCACCAAGGAC
ACCTACGACGCCCTGCACATGCAGGCCCTGCCCCCCCGC

[0342] Relative Position of the First and Second Polynucleotides

[0343] In preferred embodiments the first polynucleotide encoding FOXP3 is upstream of the second polynucleotide encoding a HLA specific CAR. Accordingly, in preferred embodiments the first polynucleotide and the second polynucleotide are operably linked to the same promoter and the first polynucleotide is upstream of the second polynucleotide

[0344] As used herein the term “upstream” when referring to polynucleotides means that the “upstream” polynucleotide is 5′ to the “downstream” polynucleotide. In other words, in preferred embodiments the vector may have the orientation of: 5′ FOXP3-HLA specific CAR 3′. In more preferred embodiment the vector may have the structure: 5′ Promoter-FOXP3-HLA specific CAR 3′. Here, FOXP3 expression is directly driven by the promoter for optimal expression.

[0345] Importantly, a configuration in which FOXP3 precedes the CAR in the 5′ to 3′ direction ensures that the CAR expression can only occur when (exogenous) FOXP3 has been expressed and that expression of CAR without FOXP3 does not occur. This is a particular advantage in the present context of an engineered Treg, as it reduces the risk of an engineered Treg acquiring an effector phenotype and/or reduces the risk associated with introducing the CAR into a T effector cell present in a starting population.

[0346] Cleavage Site and Internal Ribosome Entry Sites

[0347] The polynucleotide encoding FOXP3 may be separated from the polynucleotide encoding the HLA specific CAR by a nucleic acid sequence which enables both the nucleic acid sequence encoding FOXP3 and the nucleic acid sequence encoding the CAR to be expressed from the same mRNA transcript.

[0348] For example, the vector may comprise an internal ribosome entry site (IRES) between the nucleic acid sequences which encode (i) FOXP3 and (ii) the HLA specific CAR. An IRES is a nucleotide sequence that allows for translation initiation in the middle of a mRNA sequence. Suitably, the vector may have the structure: 5′ Promoter-FOXP3-IRES-HLA specific CAR 3′.

[0349] Suitably, the vector may comprise a nucleic acid sequence encoding (i) FOXP3 and (ii) the HLA specific CAR linked by a cleavage domain. Such sequences may either auto-cleave during protein production or may be cleaved by common enzymes present in the cell. preferably, the cleavage domain auto-cleaves. Accordingly, inclusion of a cleavage domain in the polypeptide sequence enables a first and a second polypeptide to be expressed as a single polypeptide, which is subsequently cleaved to provide discrete, separated functional polypeptides. Suitably, the vector may have the structure: 5′ Promoter-FOXP3-cleavage domain-HLA specific CAR 3′. Suitable cleavage domains may include the furin site (e.g. SEQ ID NOs: 238 or 239).

Furin site-cleavage domain:
(SEQ ID NO: 238)
RXXR (preferentially: RRKR (SEQ ID NO: 239))

[0350] Preferably, the vector comprises a nucleic acid sequence encoding (i) FOXP3 and (ii) the HLA specific CAR linked by a self-cleaving sequence. Such sequences auto-cleave during protein production. Suitably, the vector may have the structure: 5′ Promoter-FOXP3-self-cleaving sequence-HLA specific CAR 3′.

[0351] Preferably, the self-cleaving sequence is a polynucleotide sequence encoding a 2A self-cleaving peptide. Suitably, the vector may have the structure: 5′ Promoter-FOXP3-2A self-cleaving peptide-HLA specific CAR 3′.

[0352] Overall, 2A peptides lead to relatively high levels of downstream protein expression compared to other strategies for multi-gene co-expression, and they are small in size thus bearing a lower risk of interfering with the function of co-expressed genes (Liu, Z., et al., 2017. Scientific reports, 7(1), p. 2193).

[0353] Moreover, the mechanism of 2A-mediated “self-cleavage” is ribosome skipping the formation of a glycyl-prolyl peptide bond at the C-terminus of the 2A. A highly conserved sequence GDVEXNPGP (SEQ ID NO: 240) is shared by different 2As at the C-terminus, and is essential for the creation of steric hindrance and ribosome skipping. There are three possibilities for a 2A-mediated skipping event: (1) successful skipping and recommencement of translation results in two “cleaved” proteins: the protein upstream of the 2A is attached to the complete 2A peptide except for the C-terminal proline, and the protein downstream of the 2A is attached to one proline at the N-terminus; (2) successful skipping but ribosome fall-off and discontinued translation results in only the protein upstream of 2A; and (3) unsuccessful skipping and continued translation resulting in a fusion protein. Due to the risk of possibility (2), a configuration in which FOXP3 precedes the CAR in the 5′ to 3′ direction ensures that the CAR expression can only occur when FOXP3 has been expressed and that expression of CAR without FOXP3 does not occur.

[0354] Suitable self-cleaving peptides include a P2A peptide, a T2A peptide, a E2A peptide, and a F2A peptide.

[0355] Suitably, the vector may have the structure:
[0356] (i) 5′ Promoter-FOXP3-P2A-HLA specific CAR 3′;
[0357] (ii) 5′ Promoter-FOXP3-T2A-HLA specific CAR 3′;
[0358] (iii) 5′ Promoter-FOXP3-E2A-HLA specific CAR 3′; or
[0359] (iv) 5′ Promoter-FOXP3-F2A-HLA specific CAR 3′.

[0360] Preferably, the vector may have the structure: 5′ Promoter-FOXP3-P2A-HLA specific CAR 3′.

[0361] Illustrative sequences for a P2A peptide, a T2A peptide, a E2A peptide, and a F2A peptide are shown below. The self-cleaving sequence may comprise or consist of a polynucleotide sequence encoding any of SEQ ID NOs: 213, 215, 217, 219, 242, 244, 246, or 248 or encoding a variant which is at least 80% identical to any of SEQ ID NOs: 213, 215, 217, 219, 242, 244, 246, or 248.

Illustrative P2A peptide-cleavage domain
(SEQ ID NO: 213):
GSGATNFSLLKQAGDVEENPGP
Illustrative T2A peptide-cleavage domain
(SEQ ID NO: 215):
GSGEGRGSLLTCGDVEENPGP
Illustrative E2A peptide-cleavage domain
(SEQ ID NO: 217):
GSGQCTNYALLKLAGDVESNPGP
Illustrative F2A peptide-cleavage domain
(SEQ ID NO: 219):
GSGVKQTLNFDLLKLAGDVESNPGP
Illustrative P2A peptide-cleavage domain
(SEQ ID NO: 242):
ATNFSLLKQAGDVEENPGP
Illustrative T2A peptide-cleavage domain
(SEQ ID NO: 244):
EGRGSLLTCGDVEENPGP
Illustrative E2A peptide-cleavage domain
(SEQ ID NO: 246):
QCTNYALLKLAGDVESNPGP
Illustrative F2A peptide-cleavage domain
(SEQ ID NO: 248):
VKQTLN FDLLKLAG DVESN PG P

[0362] The self-cleaving sequence may comprise or consist of a polynucleotide sequence encoding a variant which has at least 85%, at least 90%, at least 95%, at least 97%, at least 98% or at least 99% identity to any one of SEQ ID NOs: 213, 215, 217, 219, 242, 244, 246, or 248.

[0363] Illustrative polynucleotide sequences encoding a P2A peptide, a T2A peptide, a E2A peptide, and a F2A peptide are shown below. The self-cleaving sequence may comprise or consist of a polynucleotide selected from any of SEQ ID NOs: 214, 216, 218, 220, 243, 245, 247, or 249 or a variant which is at least 80% identical to any of SEQ ID NOs: 214, 216, 218, 220, 243, 245, 247, or 249.

Illustrative P2A peptide-cleavage domain
(SEQ ID NO: 214):
GGCAGCGGCGCCACCAACTTCAGCCTGCTGAAGCAGGCCGGCGACGTGG
AGGAGAACCCCGGCCCC
Illustrative T2A peptide-cleavage domain
(SEQ ID NO: 216):
GGCAGCGGCGAGGGCCGCGGCAGCCTGCTGACCTGCGGCGACGTGGAGG
AGAACCCCGGCCCC
Illustrative E2A peptide-cleavage domain
(SEQ ID NO: 218);
GGCAGCGGCCAGTGCACCAACTACGCCCTGCTGAAGCTGGCCGGCGACG
TGGAGAGCAACCCCGGCCCC
Illustrative F2A peptide-cleavage domain
(SEQ ID NO: 220):
GGCAGCGGCGTGAAGCAGACCCTGAACTTCGACCTGCTGAAGCTGGCCG
GCGACGTGGAGAGCAACCCCGGCCCC
Illustrative P2A peptide-cleavage domain
(SEQ ID NO: 243):
GCCACCAACTTCAGCCTGCTGAAGCAGGCCGGCGACGTGGAGGAGAACC
CCGGCCCC
Illustrative T2A peptide-cleavage domain
(SEQ ID NO: 245):
GAGGGCCGCGGCAGCCTGCTGACCTGCGGCGACGTGGAGGAGAACCCCG
GCCCC
Illustrative E2A peptide-cleavage domain
(SEQ ID NO: 247):
CAGTGCACCAACTACGCCCTGCTGAAGCTGGCCGGCGACGTGGAGAGCA
ACCCCGGCCCC
Illustrative F2A peptide-cleavage domain
(SEQ ID NO: 249):
GTGAAGCAGACCCTGAACTTCGACCTGCTGAAGCTGGCCGGCGACGTGG
AGAGCAACCCCGGCCCC

[0364] The self-cleaving sequence may comprise or consist of a variant which has at least 85%, at least 90%, at least 95%, at least 97%, at least 98% or at least 99% identity to any one of SEQ ID NOs: 214, 216, 218, 220, 243, 245, 247, or 249.

[0365] Polynucleotides and Polypeptides

[0366] In the present invention, HLA specific cells are generated by introducing into the cells a polynucleotide (sometimes referred to herein as a first polynucleotide) encoding a FOXP3 polypeptide and a polynucleotide (sometimes referred to herein as a second polynucleotide) encoding a HLA specific chimeric antigen receptor (CAR).

[0367] The terms “polynucleotide” and “nucleic acid” are intended to be synonymous with each other. A polynucleotide may be any suitable type of nucleotide sequence, such as a synthetic RNA/DNA sequence, a cDNA sequence or a partial genomic DNA sequence.

[0368] The term “polypeptide” is synonymous with “protein” and means a series of residues, typically L-amino acids, connected to one another typically by peptide bonds between the α-amino and carboxyl groups of adjacent amino acids.

[0369] Numerous different polynucleotides can encode the same polypeptide as a result of the degeneracy of the genetic code. The skilled person may make nucleotide substitutions that do not affect the polypeptide sequence encoded by the polynucleotides to reflect the codon usage of any particular host organism in which the polypeptides are to be expressed.

[0370] The polynucleotide may comprise DNA or RNA, may be single-stranded or double-stranded and may include synthetic or modified nucleotides. A number of different types of modification to oligonucleotides are known in the art. These include methylphosphonate and phosphorothioate backbones, addition of acridine or polylysine chains at the 3′ and/or 5′ ends of the molecule. Polynucleotides may be modified by any method in the art. Such modifications may enhance the in vivo activity or life span of the polynucleotide.

[0371] The polynucleotide may be in isolated or recombinant form. It may be incorporated into a vector and the vector may be incorporated into a host cell.

[0372] The polynucleotide may be codon optimised. Different cells differ in their usage of particular codons. This codon bias corresponds to a bias in the relative abundance of particular tRNAs in the cell type. By altering the codons in the sequence so that they are tailored to match with the relative abundance of corresponding tRNAs, it is possible to increase expression. Suitably, the polynucleotide may be codon optimised for expression in a murine model of disease. Suitably, the polynucleotide may be codon optimised for expression in a human subject.

[0373] Many viruses, including HIV and other lentiviruses, use a large number of rare codons and by changing these to correspond to commonly used mammalian codons, increased expression of the packaging components in mammalian producer cells can be achieved. Codon usage tables are known in the art for mammalian cells, as well as for a variety of other organisms. Codon optimisation may also involve the removal of mRNA instability motifs and cryptic splice sites.

[0374] Variants, Derivatives and Fragments

[0375] In addition to the specific polypeptides and polynucleotides mentioned herein, the present invention also encompasses the use of derivatives, variants and fragments thereof.

[0376] The term “derivative” as used herein, in relation to proteins or polypeptides of the present invention includes any substitution of, variation of, modification of, replacement of, deletion of and/or addition of one (or more) amino acid residues from or to the sequence providing that the resultant polypeptide retains the desired function (for example, where the derivative or variant is an antigen binding domain, the desired function may be the ability of the antigen binding domain to bind its target antigen, or where the derivative or variant is a signalling domain, the desired function may be the ability of that domain to signal (e.g. activate or inactivate a downstream molecule). The variant or derivative may have at least 10%, at least 20%, at least 30%, at least 40%, at least 50%, at least 60%, at least 70%, at least 80%, or at least 90% function as compared to the corresponding reference sequence; a similar or the same level of function as compared to the corresponding reference sequence; or an increased level of function as compared to the corresponding reference sequence, for example function increased by at least 10%, at least 20%, at least 30%, at least 40%, or at least 50% compared to an unmodified sequence.

[0377] Typically, amino acid substitutions may be made, for example from 1, 2 or 3 to 10 or 20 substitutions provided that the modified sequence retains the required activity or ability e.g. at least 10%, at least 20%, at least 30%, at least 40%, at least 50%, at least 60%, at least 70%, at least 80%, or at least 90% activity as compared to the corresponding reference sequence; a similar or the same level of activity as compared to an the corresponding reference sequence; or an increased level of activity as compared to the corresponding reference sequence, for example activity increased by at least 10%, at least 20%, at least 30%, at least 40%, or at least 50% compared to an unmodified sequence. Amino acid substitutions may include the use of non-naturally occurring analogues.

[0378] Proteins or peptides used in the present invention may also have deletions, insertions or substitutions of amino acid residues which produce a silent change and result in a functionally equivalent protein. Deliberate amino acid substitutions may be made on the basis of similarity in polarity, charge, solubility, hydrophobicity, hydrophilicity and/or the amphipathic nature of the residues as long as the endogenous function is retained. For example, negatively charged amino acids include aspartic acid and glutamic acid; positively charged amino acids include lysine and arginine; and amino acids with uncharged polar head groups having similar hydrophilicity values include asparagine, glutamine, serine, threonine and tyrosine.

[0379] Conservative substitutions may be made, for example according to the table below. Amino acids in the same block in the second column and preferably in the same line in the third column may be substituted for each other:

| | | |
|---|---|---|
| ALIPHATIC | Non-polar | G A P |
| | | I L V |
| | Polar-uncharged | C S T M |
| | | N Q |
| | Polar-charged | D E |
| | | K R H |
| AROMATIC | | F W Y |

[0380] The derivative may be a homolog or variant. The term “homologue” or “variant” as used herein means an entity having a certain homology with the wild type amino acid sequence and the wild type nucleotide sequence. The term “homology” can be equated with “identity”.

[0381] A homologous or variant sequence may include an amino acid sequence or a nucleotide sequence which may be at least 50%, at least 55%, at least 65%, at least 70%, at least 75%, at least 80%, at least 85% or at least 90% identical, preferably at least 95% or at least 97% or at least 99% identical to the subject sequence. Typically, the homologues will have similar chemical properties/functions e.g. comprise the same binding sites etc. as the subject amino acid sequence or the amino acid sequence encoded by the subject nucleotide sequence. Although homology can also be considered in terms of similarity (i.e. amino acid residues having similar chemical properties/functions), in the context of the present invention it is preferred to express homology in terms of sequence identity.

[0382] Homology comparisons can be conducted by eye or, more usually, with the aid of readily available sequence comparison programs. These commercially available computer programs can calculate percentage homology or identity between two or more sequences.

[0383] Percentage homology may be calculated over contiguous sequences, i.e. one sequence is aligned with the other sequence and each amino acid in one sequence is directly compared with the corresponding amino acid in the other sequence, one residue at a time. This is called an “ungapped” alignment. Typically, such ungapped alignments are performed only over a relatively short number of residues.

[0384] Although this is a very simple and consistent method, it fails to take into consideration that, for example, in an otherwise identical pair of sequences, one insertion or deletion in the nucleotide sequence may cause the following codons to be put out of alignment, thus potentially resulting in a large reduction in percent homology when a global alignment is performed. Consequently, most sequence comparison methods are designed to produce optimal alignments that take into consideration possible insertions and deletions without penalising unduly the overall homology score. This is achieved by inserting “gaps” in the sequence alignment to try to maximise local homology.

[0385] However, these more complex methods assign “gap penalties” to each gap that occurs in the alignment so that, for the same number of identical amino acids, a sequence alignment with as few gaps as possible, reflecting higher relatedness between the two compared sequences, will achieve a higher score than one with many gaps. “Affine gap costs” are typically used that charge a relatively high cost for the existence of a gap and a smaller penalty for each subsequent residue in the gap. This is the most commonly used gap scoring system. High gap penalties will of course produce optimised alignments with fewer gaps. Most alignment programs allow the gap penalties to be modified. However, it is preferred to use the default values when using such software for sequence comparisons. For example when using the GCG Wisconsin Bestfit package the default gap penalty for amino acid sequences is −12 for a gap and −4 for each extension.

[0386] Calculation of maximum percentage homology therefore firstly requires the production of an optimal alignment, taking into consideration gap penalties. A suitable computer program for carrying out such an alignment is the GCG Wisconsin Bestfit package (University of Wisconsin, U.S.A.; Devereux et al. (1984) Nucleic Acids Res. 12: 387). Examples of other software that can perform sequence comparisons include, but are not limited to, the BLAST package (see Ausubel et al. (1999) ibid—Ch. 18), FASTA (Atschul et al. (1990) J. Mol. Biol. 403-410) and the GENEWORKS suite of comparison tools. Both BLAST and FASTA are available for offline and online searching (see Ausubel et al. (1999) ibid, pages 7-58 to 7-60). However, for some applications, it is preferred to use the GCG Bestfit program. Another tool, called BLAST 2 Sequences is also available for comparing protein and nucleotide sequences (see FEMS Microbiol. Lett. (1999) 174: 247-50; FEMS Microbiol. Lett. (1999) 177: 187-8).

[0387] Although the final percentage homology can be measured in terms of identity, the alignment process itself is typically not based on an all-or-nothing pair comparison. Instead, a scaled similarity score matrix is generally used that assigns scores to each pairwise comparison based on chemical similarity or evolutionary distance. An example of such a matrix commonly used is the BLOSUM62 matrix—the default matrix for the BLAST suite of programs. GCG Wisconsin programs generally use either the public default values or a custom symbol comparison table if supplied (see the user manual for further details). For some applications, it is preferred to use the public default values for the GCG package, or in the case of other software, the default matrix, such as BLOSUM62. Suitably, the percentage identity is determined across the entirety of the reference and/or the query sequence.

[0388] Once the software has produced an optimal alignment, it is possible to calculate percentage homology, preferably percentage sequence identity. The software typically does this as part of the sequence comparison and generates a numerical result.

[0389] “Fragments” typically refers to a selected region of the polypeptide or polynucleotide that is of interest functionally. “Fragment” thus refers to an amino acid or nucleic acid sequence that is a portion of a full-length polypeptide or polynucleotide, respectively.

[0390] Such derivatives, variants and fragments may be prepared using standard recombinant DNA techniques such as site-directed mutagenesis. Where insertions are to be made, synthetic DNA encoding the insertion together with 5′ and 3′ flanking regions corresponding to the naturally-occurring sequence either side of the insertion site may be made. The flanking regions will contain convenient restriction sites corresponding to sites in the naturally-occurring sequence so that the sequence may be cut with the appropriate enzyme(s) and the synthetic DNA ligated into the cut. The DNA is then expressed in accordance with the invention to make the encoded protein. These methods are only illustrative of the numerous standard techniques known in the art for manipulation of DNA sequences and other known techniques may also be used.

[0391] Vectors

[0392] In some embodiments of the invention the polynucleotide (sometimes referred to herein as a first polynucleotide) encoding FOXP3 and/or the polynucleotide (sometimes referred to herein as a second polynucleotide) encoding a HLA specific CAR are a contiguous portion of a vector.

[0393] In preferred embodiments the first polynucleotide encoding FOXP3 and the second polynucleotide encoding a HLA specific CAR are present in a single vector.

[0394] A vector is a tool that allows or facilitates the transfer of an entity from one environment to another. In accordance with the present invention, and by way of example, some vectors used in recombinant nucleic acid techniques allow entities, such as a segment of nucleic acid (e.g. a heterologous DNA segment, such as a heterologous cDNA segment), to be transferred into a target cell.

[0395] Vectors may be non-viral or viral. Examples of vectors used in recombinant nucleic acid techniques include, but are not limited to, plasmids, mRNA molecules (e.g. in vitro transcribed mRNAs), chromosomes, artificial chromosomes and viruses. The vector may also be, for example, a naked nucleic acid (e.g. DNA). In its simplest form, the vector may itself be a nucleotide of interest. Preferably, the vector is capable of sustained high-level expression in host cells.

[0396] Suitably, the vectors used in the present invention may be, for example, plasmid, mRNA or viral vectors. In preferred embodiments, the vector is a viral vector.

[0397] A number of viral based systems have been developed for gene transfer into mammalian cells. For example, retroviruses provide a convenient platform for gene delivery systems. A selected gene can be inserted into a vector and packaged in retroviral particles using techniques known in the art. The recombinant virus can then be isolated and delivered to cells of the subject either in vivo or ex vivo.

[0398] The vector may include a promoter for the expression of the polynucleotide, and optionally one or more regulators of the promoter. In preferred embodiments the first polynucleotide encoding FOXP3 and the second polynucleotide encoding a HLA specific CAR are present in a single vector and the first polynucleotide and the second polynucleotide are operably linked to the same promoter (e.g. a LTR).

[0399] Vectors of the invention may be introduced into cells using a variety of techniques known in the art, such as transformation and transduction. Several techniques are known in the art, for example infection with recombinant viral vectors, such as retroviral, lentiviral, adenoviral, adeno-associated viral, baculoviral and herpes simplex viral vectors; direct injection of nucleic acids and biolistic transformation. Multiple vectors could be used for transduction/transfection.

[0400] Non-viral delivery systems include but are not limited to DNA transfection methods. Here, transfection includes a process using a non-viral vector to deliver a gene to a target cell. Non-viral delivery systems can include liposomal or amphipathic cell penetrating peptides, preferably complexed with a polynucleotide of the invention.

[0401] Typical transfection methods include electroporation, DNA biolistics, lipid-mediated transfection, compacted DNA-mediated transfection, liposomes, immunoliposomes, lipofectin, cationic agent-mediated transfection, cationic facial amphiphiles (CFAs) (Nat. Biotechnol. (1996) 14: 556) and combinations thereof.

[0402] Viral Vectors

[0403] The vector of the present invention may be a viral vector.

[0404] The viral vector may be any viral vector known to those of skill in the art. In particular, a number of viral based systems have been developed for gene transfer into mammalian cells.

[0405] Suitably the viral vector is a retroviral vector, a lentiviral vector, an adenoviral vector, a pox viral vector, or a vaccinia virus vector. Preferably, the viral vector is a retroviral vector (e.g. a gamma retroviral vector) or a lentiviral vector. More preferably, the viral vector is a lentiviral vector.

[0406] Suitably, the vector used in the present invention is a retrovirus-based vector which has been genetically engineered so that it cannot replicate and produce progeny infectious virus particles once the virus has entered the target cell. There are many retroviruses that are widely used for delivery of genes both in tissue culture conditions and in living organisms. Examples include and are not limited to murine leukemia virus (MLV), human immunodeficiency virus (HIV-1), equine infectious anaemia virus (EIAV), mouse mammary tumour virus (MMTV), Rous sarcoma virus (RSV), Fujinami sarcoma virus (FuSV), Moloney murine leukemia virus (Mo-MLV), FBR murine osteosarcoma virus (FBR MSV), Moloney murine sarcoma virus (Mo-MSV), Abelson murine leukemia virus (A-MLV), Avian myelocytomatosis virus-29 (MC29), and Avian erythroblastosis virus (AEV) and all other retroviridiae including lentiviruses. A detailed list of retroviruses may be found in Coffin et al., 1997, “retroviruses”, Cold Spring Harbour Laboratory Press Eds: J M Coffin, S M Hughes, H E Varmus pp 758-763.

[0407] The basic structure of a retrovirus genome is a 5′ LTR and a 3′ LTR, between or within which are located a packaging signal to enable the genome to be packaged, a primer binding site, integration sites to enable integration into a host cell genome and gag, pol and env genes encoding the packaging components—these are polypeptides required for the assembly of viral particles. More complex retroviruses have additional features, such as rev and RRE sequences in HIV, which enable the efficient export of RNA transcripts of the integrated provirus from the nucleus to the cytoplasm of an infected target cell.

[0408] In the provirus, these genes are flanked at both ends by regions called long terminal repeats (LTRs). The LTRs are responsible for proviral integration, and transcription. LTRs also serve as enhancer-promoter sequences and can control the expression of the viral genes. Encapsidation of the retroviral RNAs occurs by virtue of a psi sequence located at the 5′ end of the viral genome.

[0409] The LTRs themselves are identical sequences that can be divided into three elements, which are called U3, R and U5. U3 is derived from the sequence unique to the 3′ end of the RNA. R is derived from a sequence repeated at both ends of the RNA and U5 is derived from the sequence unique to the 5′ end of the RNA. The sizes of the three elements can vary considerably among different retroviruses.

[0410] In a retroviral vector genome of the present invention gag, pol and env may be absent or not functional. The R regions at both ends of the RNA are repeated sequences. U5 and U3 represent unique sequences at the 5′ and 3′ ends of the RNA genome respectively.

[0411] Preferably the envelope is one which allows transduction of human cells, preferably T cells, most preferably Tregs. Examples of suitable env genes include, but are not limited to, VSV-G, a MLV amphotropic env such as the 4070A env, the RD114 feline leukaemia virus env or haemagglutinin (HA) from an influenza virus. The Env protein may be one which is capable of binding to a receptor on a limited number of human cell types and may be an engineered envelope containing targeting moieties. The env and gag-pol coding sequences are transcribed from a promoter and optionally an enhancer active in the chosen packaging cell line and the transcription unit is terminated by a polyadenylation signal. For example, if the packaging cell is a human cell, a suitable promoter-enhancer combination is that from the human cytomegalovirus major immediate early (hCMV-MIE) gene and a polyadenylation signal from SV40 virus may be used. Other suitable promoters and polyadenylation signals are known in the art.

[0412] In preferred embodiments, the vector of the present invention is a lentiviral vector. Lentivirus vectors are part of a larger group of retroviral vectors. A detailed list of lentiviruses may be found in Coffin et al (“Retroviruses” 1997 Cold Spring Harbour Laboratory Press Eds: J M Coffin, S M Hughes, H E Varmus pp 758-763). In brief, lentiviruses can be divided into primate and non-primate groups. Examples of primate lentiviruses include but are not limited to: the human immunodeficiency virus (HIV), the causative agent of human acquired-immunodeficiency syndrome (AIDS), and the simian immunodeficiency virus (SIV). The non-primate lentiviral group includes the prototype “slow virus” visna/maedi virus (VMV), as well as the related caprine arthritis-encephalitis virus (CAEV), equine infectious anaemia virus (EIAV) and the more recently described feline immunodeficiency virus (FIV) and bovine immunodeficiency virus (BIV).

[0413] A distinction between the lentivirus family and other types of retroviruses is that lentiviruses have the capability to infect both dividing and non-dividing cells. In contrast, other retroviruses are unable to infect non-dividing or slowly dividing cells such as those that make up, for example, muscle, brain, lung and liver tissue. As lentiviruses are able to transduce terminally differentiated/primary cells, the use of a lentiviral screening strategy allows library selection in a primary target non-dividing or slowly dividing host cell.

[0414] The vector of the present invention may be packaged into a viral particle. Methods of packaging viral particles are well known to those of skill in the art. For example, methods of producing and packaging retroviral vectors are described in Merten, O. W., 2004. The Journal of Gene Medicine: A cross-disciplinary journal for research on the science of gene transfer and its clinical applications, 6(S1), pp. S105-S124. For example, methods of producing and packaging lentiviral particles are described in in Merten, O. W., et al., 2016. Molecular Therapy-Methods & Clinical Development, 3, p. 16017 and Zufferey, R., 2002. Production of lentiviral vectors. In Lentiviral Vectors (pp. 107-121). Springer, Berlin, Heidelberg.

[0415] Illustrative Vector Constructs

[0416] Illustrative vectors for use in the present invention are described below.

[0417] Suitably, the vector may comprise (5′ to 3′):
[0418] (i) a first polynucleotide which comprises or consists of a polynucleotide sequence which has at least 70% identity (e.g. at least 75%, at least 80%, at least 85%, at least 90%, at least 95%, at least 98%, at least 99%, or 100% identity) to SEQ ID NO: 3, or a functional fragment thereof, a cleavage domain and/or an IRES, and a second polynucleotide which comprises a polynucleotide sequence which has at least 70% identity (e.g. at least 75%, at least 80%, at least 85%, at least 90%, at least 95%, at least 98%, at least 99%, or 100% identity) to SEQ ID NO: 211;
[0419] (ii) a first polynucleotide which comprises or consists of a polynucleotide sequence which has at least 70% identity (e.g. at least 75%, at least 80%, at least 85%, at least 90%, at least 95%, at least 98%, at least 99%, or 100% identity) to SEQ ID NO: 3, or a functional fragment thereof, a cleavage domain and/or an IRES, and a second polynucleotide which comprises a polynucleotide sequence which has at least 70% identity (e.g. at least 75%, at least 80%, at least 85%, at least 90%, at least 95%, at least 98%, at least 99%, or 100% identity) to SEQ ID NO: 212;
[0420] (iii) a first polynucleotide which comprises or consists of a polynucleotide sequence which has at least 70% identity (e.g. at least 75%, at least 80%, at least 85%, at least 90%, at least 95%, at least 98%, at least 99%, or 100% identity) to SEQ ID NO: 4, or a functional fragment thereof, a cleavage domain and/or an IRES, and a second polynucleotide which comprises a polynucleotide sequence which has at least 70% identity (e.g. at least 75%, at least 80%, at least 85%, at least 90%, at least 95%, at least 98%, at least 99%, or 100% identity) to SEQ ID NO: 211; or
[0421] (iv) a first polynucleotide which comprises or consists of a polynucleotide sequence which has at least 70% identity (e.g. at least 75%, at least 80%, at least 85%, at least 90%, at least 95%, at least 98%, at least 99%, or 100% identity) to SEQ ID NO: 4, or a functional fragment thereof, a cleavage domain and/or an IRES, and a second polynucleotide which comprises a polynucleotide sequence which has at least 70% (e.g. at least 75%, at least 80%, at least 85%, at least 90%, at least 95%, at least 98%, at least 99%, or 100% identity) identity to SEQ ID NO: 212.

[0422] The first polynucleotide and the second polynucleotide may be operably linked to the same promoter. Suitably the vector is a viral vector, preferably a retroviral vector or a lentiviral vector.

[0423] Suitably, the vector may comprise (5′ to 3′):
[0424] (i) a first polynucleotide which comprises or consists of a polynucleotide sequence which has at least 70% identity (e.g. at least 75%, at least 80%, at least 85%, at least 90%, at least 95%, at least 98%, at least 99%, or 100% identity) to SEQ ID NO: 3, or a functional fragment thereof, a self-cleaving sequence which has at least 70% (e.g. at least 75%, at least 80%, at least 85%, at least 90%, at least 95%, at least 98%, at least 99%, or 100% identity) identity to SEQ ID NO: 214, and a second polynucleotide which comprises a polynucleotide sequence which has at least 70% identity (e.g. at least 75%, at least 80%, at least 85%, at least 90%, at least 95%, at least 98%, at least 99%, or 100% identity) to SEQ ID NO: 211;
[0425] (ii) a first polynucleotide which comprises or consists of a polynucleotide sequence which has at least 70% identity (e.g. at least 75%, at least 80%, at least 85%, at least 90%, at least 95%, at least 98%, at least 99%, or 100% identity) to SEQ ID NO: 3, or a functional fragment thereof, a self-cleaving sequence which has at least 70% (e.g. at least 75%, at least 80%, at least 85%, at least 90%, at least 95%, at least 98%, at least 99%, or 100% identity) identity to SEQ ID NO: 214, and a second polynucleotide which comprises a polynucleotide sequence which has at least 70% identity (e.g. at least 75%, at least 80%, at least 85%, at least 90%, at least 95%, at least 98%, at least 99%, or 100% identity) to SEQ ID NO: 212;
[0426] (iii) a first polynucleotide which comprises or consists of a polynucleotide sequence which has at least 70% identity (e.g. at least 75%, at least 80%, at least 85%, at least 90%, at least 95%, at least 98%, at least 99%, or 100% identity) to SEQ ID NO: 4, a self-cleaving sequence which has at least 70% (e.g. at least 75%, at least 80%, at least 85%, at least 90%, at least 95%, at least 98%, at least 99%, or 100% identity) identity to SEQ ID NO: 214, and a second polynucleotide which comprises a polynucleotide sequence which has at least 70% identity (e.g. at least 75%, at least 80%, at least 85%, at least 90%, at least 95%, at least 98%, at least 99%, or 100% identity) to SEQ ID NO: 211; or
[0427] (iv) a first polynucleotide which comprises or consists of a polynucleotide sequence which has at least 70% identity (e.g. at least 75%, at least 80%, at least 85%, at least 90%, at least 95%, at least 98%, at least 99%, or 100% identity) to SEQ ID NO: 4, or a functional fragment thereof, a self-cleaving sequence which has at least 70% (e.g. at least 75%, at least 80%, at least 85%, at least 90%, at least 95%, at least 98%, at least 99%, or 100% identity) identity to SEQ ID NO: 214, and a second polynucleotide which comprises a polynucleotide sequence which has at least 70% (e.g. at least 75%, at least 80%, at least 85%, at least 90%, at least 95%, at least 98%, at least 99%, or 100% identity) identity to SEQ ID NO: 212.

[0428] The first polynucleotide and the second polynucleotide may be operably linked to the same promoter. Suitably the vector is a viral vector, preferably a retroviral vector or a lentiviral vector.

[0429] Suitably, the vector may comprise (5′ to 3′):
[0430] (i) a first polynucleotide which comprises or consists of a polynucleotide sequence which has at least 95% identity to SEQ ID NO: 3, or a functional fragment thereof, a self-cleaving sequence which has at least 95% identity to SEQ ID NO: 214, and a second polynucleotide which comprises a polynucleotide sequence which has at least 70% identity (e.g. at least 75%, at least 80%, at least 85%, at least 90%, at least 95%, at least 98%, at least 99%, or 100% identity) to SEQ ID NO: 211;
[0431] (ii) a first polynucleotide which comprises or consists of a polynucleotide sequence which has at least 95% identity to SEQ ID NO: 3, or a functional fragment thereof, a self-cleaving sequence which has at least 95% identity to SEQ ID NO: 214, and a second polynucleotide which comprises a polynucleotide sequence which has at least 70% identity (e.g. at least 75%, at least 80%, at least 85%, at least 90%, at least 95%, at least 98%, at least 99%, or 100% identity) to SEQ ID NO: 212;
[0432] (iii) a first polynucleotide which comprises or consists of a polynucleotide sequence which has at least 95% identity to SEQ ID NO: 4, a self-cleaving sequence which has at least 95% identity to SEQ ID NO: 214, and a second polynucleotide which comprises a polynucleotide sequence which has at least 70% identity (e.g. at least 75%, at least 80%, at least 85%, at least 90%, at least 95%, at least 98%, at least 99%, or 100% identity) to SEQ ID NO: 211; or
[0433] (iv) a first polynucleotide which comprises or consists of a polynucleotide sequence which has at least 95% identity to SEQ ID NO: 4, or a functional fragment thereof, a self-cleaving sequence which has at least 95% identity to SEQ ID NO: 214, and a second polynucleotide which comprises a polynucleotide sequence which has at least 70% (e.g. at least 75%, at least 80%, at least 85%, at least 90%, at least 95%, at least 98%, at least 99%, or 100% identity) identity to SEQ ID NO: 212.

[0434] The first polynucleotide and the second polynucleotide may be operably linked to the same promoter. Suitably the vector is a viral vector, preferably a retroviral vector or a lentiviral vector.

[0435] Regulators of Gene Expression

[0436] The vector of the invention may include a promoter for the expression of the polynucleotide(s). When the first polynucleotide encoding FOXP3 and the second polynucleotide encoding a HLA specific CAR are present in the same vector, the first polynucleotide and the second polynucleotide may be operably linked to the same promoter.

[0437] A “promoter” is a region of DNA that leads to initiation of transcription of a gene. Promoters are located near the transcription start sites of genes, upstream on the DNA (towards the 5′ region of the sense strand). Any suitable promoter may be used, the selection of which may be readily made by the skilled person.

[0438] In one embodiment, the promoter may be a LTR, for example the LTR of the vector (e.g. a retroviral LTR or a lentiviral LTR).

[0439] Long terminal repeats (LTRs) are identical sequences of DNA that repeat hundreds or thousands of times found at either end of retrotransposons or proviral DNA formed by reverse transcription of retroviral RNA. They are used by viruses to insert their genetic material into the host genomes. Signals for gene expression are found in LTRs: enhancer, promoter (can have both transcriptional enhancers or regulatory elements), transcription initiation (such as capping), transcription terminator and polyadenylation signal.

[0440] Suitably, the vector of the invention may include a 5′LTR and a 3′LTR. When the first polynucleotide encoding FOXP3 and the second polynucleotide encoding a HLA specific CAR are present in the same vector, the first polynucleotide and the second polynucleotide may be operably linked to the same LTR.

[0441] The vector of the invention may comprise one or more additional regulatory sequences which may act pre- or post-transcriptionally. “Regulatory sequences” are any sequences which facilitate expression of the polypeptides, e.g. act to increase expression of a transcript or to enhance mRNA stability. Suitable regulatory sequences include for example enhancer elements, post-transcriptional regulatory elements and polyadenylation sites. Suitably, the additional regulatory sequences may be present in the LTR(s).

[0442] Suitably, the vector may comprise a Woodchuck Hepatitis Virus Posttranscriptional Regulatory Element (WPRE), e.g. operably linked to the promoter. Suitably, the vector may comprise the nucleotide sequence shown as SEQ ID NO: 250, or a variant which is at least 80% identical to SEQ ID NO: 250. Suitably, the variant may be at least 85%, at least 90%, at least 95%, at least 97%, at least 98% or at least 99% identical to SEQ ID NO: 250.

Illustrative WPRE (SEQ ID NO: 250):
AATCAACCTCTGGATTACAAAATTTGTGAAAGATTGACTGGTATTCTTA
ACTATGTTGCTCCTTTTACGCTATGTGGATACGCTGCTTTAATGCCTTT
GTATCATGCTATTGCTTCCCGTATGGCTTTCATTTTCTCCTCCTTGTAT
AAATCCTGGTTGCTGTCTCTTTATGAGGAGTTGTGGCCCGTTGTCAGGC
AACGTGGCGTGGTGTGCACTGTGTTTGCTGACGCAACCCCCACTGGTTG
GGGCATTGCCACCACCTGTCAGCTCCTTTCCGGGACTTTCGCTTTCCCC
CTCCCTATTGCCACGGCGGAACTCATCGCCGCCTGCCTTGCCCGCTGCT
GGACAGGGGCTCGGCTGTTGGGCACTGACAATTCCGTGGTGTTGTCGGG
GAAATCATCGTCCTTTCCTTGGCTGCTCGCCTATGTTGCCACCTGGATT
CTGCGCGGGACGTCCTTCTGCTACGTCCCTTCGGCCCTCAATCCAGCGG
ACCTTCCTTCCCGCGGCCTGCTGCCGGCTCTGCGGCCTCTTCCGCGTCT
TCGCCTTCGCCCTCAGACGAGTCGGATCTCCCTTTGGGCCGCCTCCCCG
C

[0443] Cells

[0444] In one aspect the present invention provides a cell comprising a vector according to the present invention. Suitably, the cell is a T cell or a T cell progenitor.

[0445] A T cell is a type of lymphocyte which develops in the thymus gland and plays a central role in the immune response. T cells can be distinguished from other lymphocytes by the presence of a T-cell receptor on the cell surface. These immune cells originate as precursor cells, derived from bone marrow, and develop into several distinct types of T cells once they have migrated to the thymus gland. T cell differentiation may continue after they have left the thymus.

[0446] T cells are grouped into a series of subsets based on their function. CD4 and CD8 T cells are selected in the thymus, but undergo further differentiation in the periphery to specialized cells which have different functions. T cell subsets were initially defined by function, but also have associated gene or protein expression patterns. Conventional adaptive T cells include helper CD4+ T cells, cytotoxic CD8+ T cells, memory T cells, and regulatory CD4+ T cells. Innate-like T cells include natural killer T cells, mucosal associated invariant T cells and gamma delta T cells.

[0447] Regulatory T Cells (Tregs)

[0448] Regulatory T cells (Treg) are immune cells with suppressive function that control cytopathic immune responses and are essential for the maintenance of immunological tolerance.

[0449] In one aspect the present invention provides a Treg comprising a vector according to the present invention. In other words, the present invention provides an engineered Treg.

[0450] An “engineered Treg” as used herein means a Treg which has been modified to comprise or express a polynucleotide which is not naturally encoded by the cell, in particular a polynucleotide encoding a FOXP3 polypeptide and/or a polynucleotide encoding a HLA specific CAR as described herein. Methods for engineering Tregs are known in the art and include, but are not limited to, genetic modification of Tregs e.g. by transduction such as retroviral or lentiviral transduction, transfection (such as transient transfection, DNA or RNA based) including lipofection, polyethylene glycol, calcium phosphate and electroporation. Any suitable method may be used to introduce a nucleic acid sequence into a Treg.

[0451] As used herein, the term “Treg” refers to a T cell with immunosuppressive function.

[0452] Suitably, “immunosuppressive function” may refer to the ability of the Treg to reduce or inhibit one or more of a number of physiological and cellular effects facilitated by the immune system in response to a stimulus such as a pathogen, antigen, e.g. an alloantigen, or an autoantigen. Examples of such effects include increased proliferation of conventional T cells (Tconv) and secretion of pro-inflammatory cytokines. Any such effects may be used as indicators of the strength of an immune response. A relatively weaker immune response by Tconv in the presence of Tregs would indicate an ability of the Treg to suppress immune responses. For example, a relative decrease in cytokine secretion would be indicative of a weaker immune response, and thus indicative of the ability of Tregs to suppress immune responses. Tregs can also suppress immune responses by modulating the expression of co-stimulatory molecules on antigen presenting cells (APCs), such as B cells, dendritic cells and macrophages. Expression levels of CD80 and CD86 can be used to assess suppression potency of activated Tregs in vitro after co-culture.

[0453] Assays are known in the art for measuring indicators of immune response strength, and thereby the suppressive ability of Tregs. In particular, antigen-specific Tconv cells may be co-cultured with Tregs, and a peptide of the corresponding antigen added to the co-culture to stimulate a response from the Tconv cells. The degree of proliferation of the Tconv cells and/or the quantity of the cytokine IL-2 they secrete in response to addition of the peptide may be used as indicators of the suppressive abilities of the co-cultured Tregs.

[0454] Antigen-specific Tconv cells co-cultured with Tregs of the present invention may proliferate 5% less, 10% less, 20% less, 30% less, 40% less, 50% less, 60% less, 70% less, 90% less, 95% less or 99% less than the same Tconv cells cultured in the absence of Tregs of the invention.

[0455] Antigen-specific Tconv cells co-cultured with Tregs of the invention may express at least 10%, at least 20%, at least 30%, at least 40%, at least 50%, or at least 60% less effector cytokine than corresponding Tconv cells cultured in the absence of Tregs of the invention.

[0456] The effector cytokine may be selected from IL-2, IL-17, TNFα, GM-CSF, IFN-γ, IL-4, IL-5, IL-9, IL-10 and IL-13.

[0457] Suitably the effector cytokine may be selected from IL-2, IL-17, TNFα, GM-CSF and IFN-γ.

[0458] Suitably, the Treg is a T cell which expresses the markers CD4, CD25 and FOXP3 (CD4+CD25+FOXP3+).

[0459] Marker levels can be determined by any method known to those of skill in the art, for example flow cytometry.

[0460] Tregs may also express CTLA-4 (cytotoxic T-lymphocyte associated molecule-4) and/or GITR (glucocorticoid-induced TNF receptor). Treg cells are present in the peripheral blood, lymph nodes, and tissues.

[0461] Suitably, the Treg may be identified using the cell surface markers CD4 and CD25 in the absence of or in combination with low-level expression of the surface protein CD127 (CD4⁺CD25⁺CD127⁻ or CD4⁺CD25⁺CD127^{low} or CD4⁺CD25^{hi}CD127⁻ or CD4⁺CD25^{hi}CD127^{low}). The use of such markers to identify Tregs is known in the art and described in Liu et al. (JEM; 2006; 203; 7(10); 1701-1711), for example.

[0462] The Treg may be a CD4⁺CD25⁺FOXP3⁺ T cell or a CD4⁺CD25^{hi}FOXP3⁺ T cell.

[0463] The Treg may be a CD4⁺CD25⁺CD127⁻ T cell or a CD4⁺CD25^{hi}CD127⁻ T cell.

[0464] The Treg may be a CD4⁺CD25⁺FOXP3⁺CD127⁻ T cell or a CD4⁺CD25^{hi}FOXP3+CD127⁻ T cell.

[0465] The Treg may have a demethylated Treg-specific demethylated region (TSDR). The TSDR is an important methylation-sensitive element regulating FOXP3 expression (Polansky, J. K., et al., 2008. European journal of immunology, 38(6), pp. 1654-1663).

[0466] The Treg may be natural or thymus-derived, adaptive or peripherally-derived, or in vitro-induced (Abbas, A. K., et al., 2013. Nature immunology, 14(4), p. 307-308). Suitably, the Treg may be CD4⁺CD25⁺FOXP3⁺Helios⁺Neuropilin 1⁺. Preferably the Treg is a natural Treg.

[0467] Further suitable Tregs include, but are not limited to, Tr1 cells, CD8⁺FOXP3⁺ T cells; and γδ FOXP3⁺ T cells.

[0468] Suitably, the Treg is isolated from peripheral blood mononuclear cells (PBMCs) obtained from a subject. Suitably the subject is a mammal, preferably a human.

[0469] Suitably, the Treg is matched (e.g. HLA-matched) or is autologous to a subject to whom the engineered Treg is to be administered. Suitably, the subject to whom the engineered Treg is to be administered is a mammal, preferably a human. The Treg may be generated ex vivo either from a patient's own peripheral blood (1st party), or in the setting of a haematopoietic stem cell transplant from donor peripheral blood (2nd party), or peripheral blood from an unconnected donor (3rd party). Suitably the Treg is autologous to the subject to whom the engineered Treg is to be administered.

[0470] In a preferred embodiment, the Treg is isolated from peripheral blood mononuclear cells (PBMCs) obtained from a subject and is matched (e.g. HLA-matched) or is autologous to the subject to whom the engineered Treg is to be administered.

[0471] Suitably, the Treg is part of a population of Tregs. Suitably, the population of Tregs comprises at least 70% Tregs, such as at least 75%, at least 85%, at least 90%, at least 95%, at least 97%, at least 98% or at least 99% Tregs. Such a population may be referred to as an “enriched Treg population” or an “enriched Treg sample”.

[0472] As used herein, the term “conventional T cell” or Icon means a T lymphocyte cell which expresses an αβ T cell receptor (TCR) as well as a co-receptor which may be cluster of differentiation 4 (CD4) or cluster of differentiation 8 (CD8) and which does not have an immunosuppressive function. Conventional T cells are present in the peripheral blood, lymph nodes, and tissues. An engineered Treg may be generated from a Icon by in vitro culture of CD4⁺CD25⁻FOXP3⁻ cells in the presence of IL-2 and TGF-β.

[0473] The Treg of the present invention may be derived from a stem cell. In particular, the Treg of the present invention may be derived from a stem cell in vitro. The Treg may be derived from ex-vivo differentiation of inducible progenitor cells or embryonic progenitor cells to the Treg. A polynucleotide or vector of the invention may introduced into the inducible progenitor cells or embryonic progenitor cells prior to, or after, differentiation to a Treg.

[0474] As used herein, the term “stem cell” means an undifferentiated cell which is capable of indefinitely giving rise to more stem cells of the same type, and from which other, specialised cells may arise by differentiation. Stem cells are multipotent. Stem cells may be for example, embryonic stem cells or adult stem cells.

[0475] As used herein, the term “progenitor cell” means a cell which is able to differentiate to form one or more types of cells but has limited self-renewal in vitro.

[0476] Suitably, the cell is capable of being differentiated into a T cell, such as a Treg.

[0477] Suitably, the cell may be an embryonic stem cell (ESC). Suitably, the cell is a haematopoietic stem cell or haematopoietic progenitor cell. Suitably, the cell is an induced pluripotent stem cell (iPSC). Suitably, the cell may be obtained from umbilical cord blood. Suitably, the cell may be obtained from adult peripheral blood.

[0478] In some aspects, hematopoietic stem and progenitor cell (HSPCs) may be obtained from umbilical cord blood. Cord blood can be harvested according to techniques known in the art (e.g., U.S. Pat. Nos. 7,147,626 and 7,131,958 which are incorporated herein by reference).

[0479] In one aspect, HSPCs may be obtained from pluripotent stem cell sources, e.g., induced pluripotent stem cells (iPSCs) and embryonic stem cells (ESCs).

[0480] As used herein, the term “hematopoietic stem and progenitor cell” or “HSPC” refers to a cell which expresses the antigenic marker CD34 (CD34+) and populations of such cells. In particular embodiments, the term “HSPC” refers to a cell identified by the presence of the antigenic marker CD34 (CD34+) and the absence of lineage (lin) markers. The population of cells comprising CD34+ and/or Lin(−) cells includes haematopoietic stem cells and hematopoietic progenitor cells.

[0481] HSPCs can be obtained or isolated from bone marrow of adults, which includes femurs, hip, ribs, sternum, and other bones. Bone marrow aspirates containing HSPCs can be obtained or isolated directly from the hip using a needle and syringe. Other sources of HSPCs include umbilical cord blood, placental blood, mobilized peripheral blood, Wharton's jelly, placenta, fetal blood, fetal liver, or fetal spleen. In particular embodiments, harvesting a sufficient quantity of HSPCs for use in therapeutic applications may require mobilizing the stem and progenitor cells in the subject.

[0482] As used herein, the term “induced pluripotent stem cell” or “iPSC” refers to a non-pluripotent cell that has been reprogrammed to a pluripotent state. Once the cells of a subject have been reprogrammed to a pluripotent state, the cells can then be programmed to a desired cell type, such as a hematopoietic stem or progenitor cell (HSC and HPC respectively).

[0483] As used herein, the term “reprogramming” refers to a method of increasing the potency of a cell to a less differentiated state.

[0484] As used herein, the term “programming” refers to a method of decreasing the potency of a cell or differentiating the cell to a more differentiated state.

[0485] The invention also provides an engineered Treg having higher FOXP3 expression than a non-engineered Treg and an engineered Treg having higher FOXP3 expression than a corresponding, non-engineered Treg.

[0486] “Higher FOXP3 expression” means levels of FOXP3 mRNA or protein in the engineered Treg are higher than they were before the Treg was manipulated by human intervention to alter its gene expression.

[0487] The “higher FOXP3 expression” may be defined and determined as described herein.

[0488] Suitably, the level of FOXP3 mRNA and/or protein in an engineered Treg according to the present invention (or a population of such Tregs) may be increased to at least 1.5-fold greater, 2-fold greater, or 5-fold greater than the level in a corresponding non-engineered Treg (or population of such Tregs).

[0489] Suitably, the level of CD25 mRNA and/or protein in an engineered Treg according to the present invention (or a population of such Tregs) may be increased to at least 1.5-fold greater, 2-fold greater, or 5-fold greater than the level in a corresponding non-engineered Treg (or population of such Tregs).

[0490] Suitably, the level of CTLA-4 mRNA and/or protein in an engineered Treg according to the present invention (or a population of such Tregs) may be increased to at least 1.5-fold greater, 2-fold greater, or 5-fold greater than the level in a corresponding non-engineered Treg (or population of such Tregs).

[0491] The engineered Treg of the present invention may comprise an exogenous polynucleotide encoding a FOXP3 polypeptide. An “exogenous polynucleotide” is a polynucleotide that originates outside the Treg.

[0492] T Effector Cells

[0493] The present invention may reduce the risk of generating an engineered T effector cell e.g. during generation of engineered Tregs.

[0494] T effector cells are relatively short-lived activated cells that defend the body in an immune response. T effector cells include cytotoxic T cells and helper T cells, which carry out cell-mediated responses. Accordingly, T effector cells may be cytotoxic T cells or helper T cells. T effector cells may express low levels of FOXP3, such that they are FOXP3^{low} w or FOXP3−. Preferably, T effector cells have no immunosuppressive function.

[0495] Most cytotoxic T cells express a subset of surface markers such as CD8, CD45 and CD54. Suitably, a cytotoxic T cell may be a CD8⁺FOXP3^{low} cell or a CD8⁺FOXP3⁻ cell.

[0496] Suitably, a cytotoxic T cell may be a CD8⁺CD45⁺FOXP3^{low} cell or a CD8⁺CD45⁺FOXP3⁻ cell.

[0497] Suitably, a cytotoxic T cell may be a CD8⁺CD54⁺FOXP3^{low} cell or a CD8⁺CD54⁺FOXP3⁻ cell.

[0498] Suitably, a cytotoxic T cell may be a CD8⁺CD45⁺CD54⁺FOXP3^{low} cell or a CD8⁺CD45⁺CD54⁺FOXP3⁻ cell.

[0499] Helper T cells (also known as T helper cells, Th cells or CD4+ cells), are a type of T cell that play an important role in the immune system, particularly in the adaptive immune system. They help the activity of other immune cells by releasing T cell cytokines. They are essential in B cell antibody class switching, in the activation and growth of cytotoxic T cells, and in maximizing bactericidal activity of phagocytes such as macrophages. T helper subtypes include Th1, Th2, Th9, Th17, Th22 and Tfh cells. Preferably, a helper T cell is a CD4+ cell without immunosuppressive function. Suitably, a helper T cell may be a CD4⁺FOXP3^{low} cell or a CD4⁺FOXP3⁻ cell.

[0500] Method of Making a Cell

[0501] Engineered Tregs of the present invention may be generated by introducing a polynucleotide (sometimes referred to herein as a first polynucleotide) encoding a FOXP3 polypeptide and/or a polynucleotide (sometimes referred to herein as a second polynucleotide) encoding a HLA specific CAR as described herein.

[0502] The term “introduce” refers to methods for inserting foreign DNA into a cell, including both transfection and transduction methods. Transfection is the process of introducing nucleic acids into a cell by non-viral methods. Transduction is the process of introducing foreign DNA into a cell via a viral vector.

[0503] The engineered Treg of the invention may be made by introducing to a Treg (e.g. by transduction or transfection) the polynucleotide(s) or vector as defined herein.

[0504] Suitably, the Treg may be from a sample isolated from a subject. The Treg may be further separated from the sample by any suitable method, for example magnetic separation.

[0505] The engineered Treg of the present invention may be generated by a method comprising the following steps:
[0506] (i) isolation of a cell-containing sample (e.g. from a subject) or provision of a cell-containing sample; and
[0507] (ii) transduction or transfection of the cell-containing sample with a polynucleotide encoding a FOXP3 polypeptide and/or a polynucleotide encoding a HLA specific CAR as described herein, or a vector as described herein (e.g. a vector encoding 5′ FOXP3-HLA specific CAR 3′), to provide a population of engineered cells.

[0508] Suitably the cell-containing sample comprises or consists of PBMCs.

[0509] Suitably, a Treg-enriched sample may be isolated from, enriched, and/or generated from the cell-containing sample prior to and/or after step (ii) of the method. For example, isolation, enrichment and/or generation of Tregs may be performed prior to and/or after step (ii) to isolate, enrich or generate a Treg-enriched sample. Isolation and/or enrichment may be performed after step (ii) to enrich for cells and/or Tregs comprising the CAR, the polynucleotide(s), and/or the vector of the present invention.

[0510] A Treg-enriched sample may be isolated or enriched by any method known to those of skill in the art, for example by FACS and/or magnetic bead sorting.

[0511] Suitably, the cell is a Treg as defined herein.

[0512] Suitably, the engineered Treg of the present invention may be generated by a method comprising the following steps:
[0513] (i) isolation of a Treg-enriched sample (e.g. from a subject) or provision of a Treg-enriched sample; and
[0514] (ii) transduction or transfection of the Treg-enriched sample with a first polynucleotide encoding a FOXP3 polypeptide and/or a second polynucleotide encoding a HLA specific CAR as described herein, or a vector as described herein (e.g. a vector encoding 5′ FOXP3-HLA specific CAR 3′), to provide a population of engineered Treg cells according to the present invention.

[0515] The cells and/or Tregs may be activated and/or expanded prior to, or after, the introduction of the polynucleotide(s) or vector, for example by treatment with an anti-CD3 monoclonal antibody or both anti-CD3 and anti-CD28 monoclonal antibodies.

[0516] The Tregs may also be expanded in the presence of anti-CD3 and anti-CD28 monoclonal antibodies in combination with IL-2. Suitably, IL-2 may be substituted with IL-15. Other components which may be used in a Treg expansion protocol include, but are not limited to rapamycin, all-trans retinoic acid (ATRA) and TGFβ.

[0517] As used herein “activated” means that a cell or population of cells has been stimulated, causing the cell(s) to proliferate. As used herein “expanded” means that a cell or population of cells has been induced to proliferate. The expansion of a population of cells may be measured for example by counting the number of cells present in a population. The phenotype of the cells may be determined by methods known in the art such as flow cytometry.

[0518] The Tregs may be washed after each step of the method, in particular after expansion.

[0519] The population of engineered Tregs may be further enriched by any method known to those of skill in the art, for example by FACS and/or magnetic bead sorting.

[0520] The steps of the method of production may be performed in a closed and sterile cell culture system.

[0521] Enhancing Engineered Treg Immunosuppression

[0522] Introducing a polynucleotide encoding a FOXP3 polypeptide (e.g. in a vector according to the present invention) into a Treg may increase FOXP3 expression and therefore enhance the ability of the Treg to suppress an immune response.

[0523] Accordingly, the present invention provides a polynucleotide encoding a FOXP3 polypeptide as described herein for use in enhancing the ability of an engineered HLA-specific Treg to suppress an immune response. Preferably, the engineered HLA-specific Treg is an engineered HLA-A2-specific Treg.

[0524] The present invention provides use of a polynucleotide encoding a FOXP3 polypeptide as described herein for enhancing the ability of an engineered HLA-specific Treg to suppress an immune response. Preferably, the engineered HLA-specific Treg is an engineered HLA-A2-specific Treg.

[0525] The present invention provides a first polynucleotide encoding a FOXP3 polypeptide as described herein and a second polynucleotide encoding a chimeric antigen receptor (CAR) as described herein for use in enhancing the ability of an engineered HLA-specific Treg to suppress an immune response, preferably an immune response against a cell expressing the HLA. The CAR may comprise a single chain antibody (scFv) antigen recognition domain as described herein, which specifically binds to a human leukocyte antigen (HLA). The first polynucleotide and the second polynucleotide may be operably linked to the same promoter. The first polynucleotide may be upstream of the second polynucleotide. The scFv antigen recognition domain may specifically bind to HLA-A2.

[0526] The present invention provides a vector as described herein, for use in enhancing the ability of an engineered HLA-specific Treg to suppress an immune response. Preferably, the engineered HLA-specific Treg is an engineered HLA-A2-specific Treg.

[0527] The present invention provides a vector as described herein for use in enhancing the ability of an engineered HLA-specific Treg to suppress an immune response, wherein the vector comprises a first polynucleotide encoding a FOXP3 polypeptide as described herein and a second polynucleotide encoding a chimeric antigen receptor (CAR) as described herein, wherein the CAR comprises a single chain antibody (scFv) antigen recognition domain which specifically binds to a human leukocyte antigen (HLA), wherein the first polynucleotide and the second polynucleotide are operably linked to the same promoter, and wherein the first polynucleotide is upstream of the second polynucleotide. The antigen recognition domain may specifically bind to HLA-A2.

[0528] The present invention provides a vector as described herein for use in enhancing the ability of an engineered HLA-specific Treg to suppress an immune response, wherein the vector comprises a first polynucleotide encoding a FOXP3 polypeptide as described herein and a second polynucleotide encoding a chimeric antigen receptor (CAR) as described herein, wherein the CAR comprises an antigen recognition domain which specifically binds to a human leukocyte antigen (HLA), wherein the first polynucleotide and the second polynucleotide are operably linked to the same promoter, wherein the first polynucleotide is upstream of the second polynucleotide and wherein the vector further comprises a polynucleotide encoding a cleavage site as described herein between the first polynucleotide and the second polynucleotide and/or an internal ribosome entry site (IRES) as described herein between the first polynucleotide and the second polynucleotide. The antigen recognition domain may specifically bind to HLA-A2.

[0529] The present invention provides use of a vector as described herein for enhancing the ability of an engineered HLA-specific Treg to suppress an immune response. Preferably, the engineered HLA-specific Treg is an engineered HLA-A2-specific Treg.

[0530] The present invention provides a method for enhancing the ability of an engineered HLA-specific Treg to suppress an immune response comprising introducing a vector as described herein into the Treg.

[0531] The vector may comprise a first polynucleotide encoding a FOXP3 polypeptide as described herein and a second polynucleotide encoding a chimeric antigen receptor (CAR) as described herein, wherein the CAR comprises a single chain antibody (scFv) antigen recognition domain which specifically binds to a human leukocyte antigen (HLA), wherein the first polynucleotide and the second polynucleotide are operably linked to the same promoter, and wherein the first polynucleotide is upstream of the second polynucleotide. The antigen recognition domain may specifically bind to HLA-A2.

[0532] The vector may comprise a first polynucleotide encoding a FOXP3 polypeptide as described herein and a second polynucleotide encoding a chimeric antigen receptor (CAR) as described herein, wherein the CAR comprises an antigen recognition domain which specifically binds to a human leukocyte antigen (HLA), wherein the first polynucleotide and the second polynucleotide are operably linked to the same promoter, wherein the first polynucleotide is upstream of the second polynucleotide and wherein the vector further comprises a polynucleotide encoding a cleavage site as described herein between the first polynucleotide and the second polynucleotide and/or an internal ribosome entry site (IRES) as described herein between the first polynucleotide and the second polynucleotide. The antigen recognition domain may specifically bind to HLA-A2.

[0533] The present invention provides a method for enhancing the ability of an engineered Treg to suppress an immune response comprising introducing a first polynucleotide encoding a FOXP3 polypeptide as described herein and a second polynucleotide encoding a HLA-specific CAR as described herein into the Treg. Preferably, the HLA-specific CAR is a HLA-A2-specific CAR. The HLA-specific CAR may comprise a single chain antibody (scFv) antigen recognition domain.

[0534] The present invention provides a method for enhancing the ability of an engineered HLA-specific Treg to suppress an immune response comprising introducing a first polynucleotide encoding a FOXP3 polypeptide as described herein and a second polynucleotide encoding a HLA-specific CAR as described herein into a cell-containing sample, wherein:
[0535] (a) the cell-containing sample comprises or consists of Tregs; and/or
[0536] (b) the cell-containing sample comprises or consists of peripheral blood mononuclear cells (PBMCs) and Tregs are enriched from the cell-containing sample prior to or after introducing the first polynucleotide and/or second polynucleotide; and/or
[0537] (c) the cell-containing sample comprises or consists of PBMCs and Tregs are generated from the cell-containing sample prior to or after introducing the first polynucleotide and/or the second polynucleotide; and/or
[0538] (d) the cell-containing sample comprises or consists of pluripotent stem cells (PSCs) (e.g. induced pluripotent stem cells (iPSCs) or human embryonic stem cells (hESCs) and Tregs are differentiated from the PSCs prior to or after introducing the first polynucleotide and/or the second polynucleotide.

[0539] Preferably, the engineered HLA-specific Treg is an engineered HLA-A2-specific Treg and the HLA-specific CAR is a HLA-A2-specific CAR. The HLA-specific CAR may comprise a single chain antibody (scFv) antigen recognition domain.

[0540] Suitably, the first polynucleotide and/or the second polynucleotide are introduced by viral transduction, preferably retroviral or lentiviral transduction.

[0541] Preferably, the first polynucleotide and the second polynucleotide are introduced in a single vector, wherein the first polynucleotide and the second polynucleotide may be operably linked to the same promoter. The vector may be a vector according to the present invention.

[0542] In other words, the present invention provides a method for enhancing the ability of an engineered HLA-specific Treg (preferably a HLA-A2-specific Treg) to suppress an immune response comprising introducing a vector as described herein into a cell-containing sample, wherein:
[0543] (a) the cell-containing sample comprises or consists of Tregs; and/or
[0544] (b) the cell-containing sample comprises or consists of peripheral blood mononuclear cells (PBMCs) and Tregs are enriched from the cell-containing sample prior to or after introducing the vector; and/or
[0545] (c) the cell-containing sample comprises or consists of PBMCs and Tregs are generated from the cell-containing sample prior to or after introducing the vector; and/or
[0546] (d) the cell-containing sample comprises or consists of pluripotent stem cells (PSCs) (e.g. induced pluripotent stem cells (iPSCs) or human embryonic stem cells (hESCs) and Tregs are differentiated from the PSCs prior to or after introducing the first polynucleotide and/or the second polynucleotide.

[0547] Preferably, the vector comprises an HLA-specific CAR. The HLA-specific CAR may be a HLA-A2-specific CAR. The HLA-specific CAR may comprise a single chain antibody (scFv) antigen recognition domain.

[0548] The expression “enhancing the ability to suppress immune responses” means to increase the suppressive effect of a Treg (or population of such Tregs) on an immune response in comparison to the suppressive effect of a corresponding Treg (or population of such Tregs) which has not been modified by introducing a first polynucleotide encoding a FOXP3 polypeptide as described herein, a second polynucleotide encoding a HLA specific CAR as described herein, and/or a vector as described herein. Preferably, the immune response is an immune response against a cell expressing HLA, more preferably HLA-A2. The increase in suppressive effect may be at least 10, 20, 30, 40, 50, 60, 70, 80 or 90% and may be measured by various means, including by measuring a decrease in the production of IL-2 by T effector cells (e.g. a decrease of at least 10, 20, 30, 40, 50, 60, 70, 80 or 90%), or an increase in the production of Treg associated cytokines, such as ID 0 (e.g. an increase of at least 10, 20, 30, 40, 50, 60, 70, 80 or 90%).

[0549] The term “immune response” refers to a number of physiological and cellular effects facilitated by the immune system in response to a stimulus such as a pathogen or an autoantigen. Examples of such effects include increased proliferation of Tconv cells and secretion of cytokines. Any such effects may be used as indicators of the strength of an immune response. A relatively weaker immune response by Tconv in the presence of modified Tregs compared to non-modified Treg would indicate a relative enhancement of the modified Tregs to suppress immune responses. For example, a relative decrease in cytokine secretion would be indicative of a weaker immune response, and thus an enhancement of the ability of Tregs to suppress immune responses.

[0550] Assays are known in the art for measuring indicators of immune response strength, and thereby the suppressive ability of Tregs. In particular, antigen-specific Tconv cells may be co-cultured with Tregs, and a peptide of the corresponding antigen added to the co-culture to stimulate a response from the Tconv cells. The degree of proliferation of the Tconv cells and/or the quantity of the cytokine IL-2 they secrete in response to addition of the peptide may be used as indicators of the suppressive abilities of the co-cultured Tregs.

[0551] Antigen-specific Tconv cells co-cultured with engineered Tregs of the present invention (i.e. having increased FOXP3 expression) may proliferate 5% less, 10% less, 15% less, 20% less, 25% less, 30% less, 35% less or 40% less than the same Tconv cells co-cultured with corresponding non-engineered Tregs (i.e. that do not have increased FOXP3 expression). Preferably, the Tconv cells are HLA-specific Tconv cells. More preferably, the Tconv cells are HLA-A2-specific Tconv cells.

[0552] Antigen-specific Tconv cells co-cultured with engineered Tregs of the present invention (i.e. having increased FOXP3 expression) may show a reduction of effector cytokine that is at least 10%, at least 20%, at least 30%, at least 40%, at least 50%, or at least 60% greater than corresponding Tconv cells co-cultured with corresponding non-engineered Tregs (i.e. that do not have increased FOXP3 expression). Preferably, the Tconv cells are HLA-specific Tconv cells. More preferably, the Tconv cells are HLA-A2-specific Tconv cells.

[0553] Antigen-specific Tconv cells co-cultured with engineered Tregs of the present invention (i.e. having increased FOXP3 expression) may produce 10% or less, 20% or less, 30% or less, 40% or less, 50% or less, or 60% or less effector cytokine than corresponding Tconv cells co-cultured with corresponding non-engineered Tregs (i.e. that do not have increased FOXP3 expression). Preferably, the Tconv cells are HLA-specific Tconv cells. More preferably, the Tconv cells are HLA-A2-specific Tconv cells.

[0554] The effector cytokine may be selected from IL-2, IL-17, TNFα, GM-CSF, IFN-γ, IL-4, IL-5, IL-9, IL-10 and IL-13. Suitably the effector cytokine may be selected from IL-2, IL-17, TNFα, GM-CSF and IFN-γ.

[0555] Antigen-specific Tconv cells co-cultured with engineered Tregs of the present invention (i.e. having increased FOXP3 expression) may achieve suppression of IL-2 production at ½, ¼, ⅛, 1/10 or 1/20 the cell number of corresponding non-engineered Tregs (i.e. that do not have increased FOXP3 expression). Preferably, the Tconv cells are HLA-specific Tconv cells. More preferably, the Tconv cells are HLA-A2-specific Tconv cells.

[0556] Reducing the Risk of an Engineered Treg Acquiring an Effector Phenotype

[0557] Introducing a polynucleotide encoding a FOXP3 polypeptide (e.g. in a vector according to the present invention) into a Treg may increase FOXP3 expression and therefore reduce the risk of an engineered Treg acquiring an effector phenotype. Moreover, a vector according to the present invention in which FOXP3 precedes a HLA specific CAR in the 5′ to 3′ direction ensures that the HLA specific CAR expression can only occur when FOXP3 has been expressed and that expression of HLA specific CAR without FOXP3 does not occur. This may further reduce the risk of an engineered HLA-specific Treg acquiring an effector phenotype.

[0558] Accordingly, the present invention provides a polynucleotide encoding a FOXP3 polypeptide as described herein for use in reducing the risk of an engineered HLA-specific Treg acquiring an effector phenotype. Preferably, the engineered HLA-specific Treg is an engineered HLA-A2-specific Treg.

[0559] The present invention provides use of a polynucleotide encoding a FOXP3 polypeptide as described herein for reducing the risk of an engineered HLA-specific Treg acquiring an effector phenotype. Preferably, the engineered HLA-specific Treg is an engineered HLA-A2-specific Treg.

[0560] The present invention provides use of a first polynucleotide encoding a FOXP3 polypeptide as described herein and a second polynucleotide encoding a chimeric antigen receptor (CAR) as described herein for reducing the risk of an engineered HLA-specific Treg acquiring an effector phenotype. The CAR may comprise a single chain antibody (scFv) antigen recognition domain as described herein, which specifically binds to a human leukocyte antigen (HLA). The first polynucleotide and the second polynucleotide may be operably linked to the same promoter. The first polynucleotide may be upstream of the second polynucleotide. The scFv antigen recognition domain may specifically bind to HLA-A2.

[0561] The present invention provides a vector as described herein for use in reducing the risk of an engineered HLA-specific Treg acquiring an effector phenotype. Preferably, the engineered HLA-specific Treg is an engineered HLA-A2-specific Treg.

[0562] The present invention provides use of a vector as described herein for reducing the risk of an engineered HLA-specific Treg acquiring an effector phenotype. Preferably, the engineered HLA-specific Treg is an engineered HLA-A2-specific Treg.

[0563] The present invention provides a method for reducing the risk of an engineered HLA-specific Treg acquiring an effector phenotype comprising introducing a vector as described herein into the Treg.

[0564] The vector may comprise a first polynucleotide encoding a FOXP3 polypeptide as described herein and a second polynucleotide encoding a chimeric antigen receptor (CAR) as described herein, wherein the CAR comprises a single chain antibody (scFv) antigen recognition domain which specifically binds to a human leukocyte antigen (HLA), wherein the first polynucleotide and the second polynucleotide are operably linked to the same promoter, and wherein the first polynucleotide is upstream of the second polynucleotide. The antigen recognition domain may specifically bind to HLA-A2.

[0565] The vector may comprise a first polynucleotide encoding a FOXP3 polypeptide as described herein and a second polynucleotide encoding a chimeric antigen receptor (CAR) as described herein, wherein the CAR comprises an antigen recognition domain which specifically binds to a human leukocyte antigen (HLA), wherein the first polynucleotide and the second polynucleotide are operably linked to the same promoter, wherein the first polynucleotide is upstream of the second polynucleotide and wherein the vector further comprises a polynucleotide encoding a cleavage site as described herein between the first polynucleotide and the second polynucleotide and/or an internal ribosome entry site (IRES) as described herein between the first polynucleotide and the second polynucleotide. The antigen recognition domain may specifically bind to HLA-A2.

[0566] The present invention provides a method for reducing the risk of an engineered HLA-specific Treg acquiring an effector phenotype comprising introducing a first polynucleotide encoding a FOXP3 polypeptide as described herein and a second polynucleotide encoding a HLA-specific CAR as described herein into the Treg. Preferably, the engineered HLA-specific Treg is an engineered HLA-A2-specific Treg and the HLA-specific CAR is a HLA-A2-specific CAR. The HLA-specific CAR may comprise a single chain antibody (scFv) antigen recognition domain.

[0567] The present invention provides a method for reducing the risk of an engineered HLA-specific Treg acquiring an effector phenotype comprising introducing a first polynucleotide encoding a FOXP3 polypeptide as described herein and a second polynucleotide encoding a HLA-specific CAR as described herein into a cell-containing sample, wherein:
[0568] (a) the cell-containing sample comprises or consists of Tregs; and/or
[0569] (b) the cell-containing sample comprises or consists of peripheral blood mononuclear cells (PBMCs) and Tregs are enriched from the cell-containing sample prior to or after introducing the first polynucleotide and/or second polynucleotide; and/or
[0570] (c) the cell-containing sample comprises or consists of PBMCs and Tregs are generated from the cell-containing sample prior to or after introducing the first polynucleotide and/or the second polynucleotide; and/or
[0571] (d) the cell-containing sample comprises or consists of pluripotent stem cells (PSCs) (e.g. induced pluripotent stem cells (iPSCs) or human embryonic stem cells (hESCs) and Tregs are differentiated from the PSCs prior to or after introducing the first polynucleotide and/or the second polynucleotide.

[0572] Preferably, the engineered HLA-specific Treg is an engineered HLA-A2-specific Treg and the HLA-specific CAR is a HLA-A2-specific CAR. The HLA-specific CAR may comprise a single chain antibody (scFv) antigen recognition domain.

[0573] Suitably, the first polynucleotide and/or the second polynucleotide are introduced by viral transduction, preferably retroviral or lentiviral transduction.

[0574] Preferably, the first polynucleotide and the second polynucleotide are introduced in a single vector, wherein the first polynucleotide and the second polynucleotide may be operably linked to the same promoter. The vector may be a vector according to the present invention.

[0575] Accordingly, the present invention provides a method for reducing the risk of an engineered HLA-specific Treg acquiring an effector phenotype comprising introducing a vector according the present invention into the Treg. Preferably, the engineered HLA-specific Treg is an engineered HLA-A2-specific Treg.

[0576] The present invention provides a method for reducing the risk of an engineered HLA-specific Treg (e.g. a HLA-A2 specific Treg) acquiring an effector phenotype comprising introducing a vector according to the present invention into a cell-containing sample, wherein:
[0577] (a) the cell-containing sample comprises or consists of Tregs; and/or
[0578] (b) the cell-containing sample comprises or consists of PBMCs and Tregs are enriched from the cell-containing sample prior to or after introducing the vector; and/or
[0579] (c) the cell-containing sample comprises or consists of PBMCs and Tregs are generated from the cell-containing sample prior to or after introducing the vector; and/or
[0580] (d) the cell-containing sample comprises or consists of pluripotent stem cells (PSCs) (e.g. induced pluripotent stem cells (iPSCs) or human embryonic stem cells (hESCs) and Tregs are differentiated from the PSCs prior to or after introducing the first polynucleotide and/or the second polynucleotide.

[0581] Preferably, the vector comprises an HLA-specific CAR. The HLA-specific CAR may be a HLA-A2-specific CAR. The HLA-specific CAR may comprise a single chain antibody (scFv) antigen recognition domain.

[0582] The expression “reducing the risk of an engineered Treg acquiring an effector phenotype” may mean to reduce the chance or rate of a Treg (or population of such Tregs) acquiring an effector phenotype in comparison to the chance or rate of a corresponding Treg (or population of such Tregs) which has not been modified by introducing a polynucleotide encoding a FOXP3 polypeptide as described herein and a polynucleotide encoding a HLA specific CAR as described herein (e.g. a HLA-A2 specific CAR), and/or a vector as described herein. Preferably, the Treg is a HLA specific Treg, more preferably a HLA-A2 specific Treg. Suitably, the chance is reduced by at least 10%, at least 20%, at least 30%, at least 40%, at least 50%, at least 60%, at least 70%, at least 80%, at least 90%, or 100%. Suitably, the rate is slowed by at least 1.5-fold, at least 2-fold, at least 5-fold, at least 10-fold, at least 20-fold, at least 50-fold, or at least 100-fold.

[0583] The expression “acquiring an effector phenotype” refers to the Treg acquiring a phenotype associated with T effector cells and/or losing a phenotype associated with Tregs.

[0584] Suitably, a T cell acquiring an effector phenotype may have reduced levels of FOXP3, CD25 and/or CTLA-4, preferably FOXP3. Methods described herein may be used for determining levels of FOXP3, CD25 and/or CTLA-4 mRNA and/or protein.

[0585] Suitably, a T cell acquiring an effector phenotype has reduced levels of FOXP3 after 1 week or more, or 2 weeks or more, or 3 weeks or more, or 4 weeks or more, or 5 weeks or more, or 6 weeks or more, or 7 weeks or more, or 8 weeks or more, preferably 7 weeks or more. Suitably, in a T cell acquiring an effector phenotype the level of FOXP3 mRNA and/or protein may be reduced by at least 1.5-fold, at least 2-fold, or at least 5-fold or greater.

[0586] Suitably, a T cell acquiring an effector phenotype has reduced levels of CD25 after 1 week or more, or 2 weeks or more, or 3 weeks or more, or 4 weeks or more, or 5 weeks or more, or 6 weeks or more, or 7 weeks or more, or 8 weeks or more, preferably 7 weeks or more. Suitably, in a T cell acquiring an effector phenotype the level of CD25 mRNA and/or protein may be reduced by at least 1.5-fold, at least 2-fold, or at least 5-fold or greater.

[0587] Suitably, a T cell acquiring an effector phenotype has reduced levels of CTLA-4 after 1 week or more, or 2 weeks or more, or 3 weeks or more, or 4 weeks or more, or 5 weeks or more, or 6 weeks or more, or 7 weeks or more, or 8 weeks or more, preferably 7 weeks or more. Suitably, in a T cell acquiring an effector phenotype the level of CTLA-4 mRNA and/or protein may be reduced by at least 1.5-fold, at least 2-fold, or at least 5-fold or greater.

[0588] Reducing the Risk of Generating an Engineered T Effector Cell

[0589] Introducing a polynucleotide encoding a FOXP3 polypeptide (e.g. in a vector according to the present invention) into a T effector cell may increase FOXP3 expression and therefore reduce the risk of generating an engineered T effector cell e.g. during generation of engineered Tregs. Moreover, a vector according to the present invention in which FOXP3 precedes a HLA specific CAR in the 5′ to 3′ direction ensures that the HLA specific CAR expression can only occur when FOXP3 has been expressed and that expression of HLA specific CAR without FOXP3 does not occur. This may further reduce the risk of generating an engineered HLA-specific T effector cell e.g. during generation of engineered Tregs.

[0590] Accordingly, the present invention provides a polynucleotide encoding a FOXP3 polypeptide as described herein for use in reducing the risk of generating an engineered T effector cell, preferably during generation of engineered Tregs, for example an engineered HLA specific T effector cell, preferably during generation of engineered HLA specific Tregs. More preferably, the engineered HLA-specific T effector cell is an engineered HLA-A2-specific T effector cell and the engineered HLA-specific Treg is an engineered HLA-A2-specific Treg.

[0591] The present invention provides use of a polynucleotide encoding a FOXP3 polypeptide as described herein for reducing the risk of generating an engineered T effector cell, preferably during generation of engineered Tregs, for example an engineered HLA specific T effector cell, preferably during generation of engineered HLA specific Tregs. More preferably, the engineered HLA-specific T effector cell is an engineered HLA-A2-specific T effector cell and the engineered HLA-specific Treg is an engineered HLA-A2-specific Treg.

[0592] The present invention provides use of a first polynucleotide encoding a FOXP3 polypeptide as described herein and a second polynucleotide encoding a chimeric antigen receptor (CAR) as described herein for reducing the risk of generating an engineered T effector cell, preferably during generation of engineered Tregs, for example an engineered HLA specific T effector cell, preferably during generation of engineered HLA specific Tregs. More preferably, the engineered HLA-specific T effector cell is an engineered HLA-A2-specific T effector cell and the engineered HLA-specific Treg is an engineered HLA-A2-specific Treg. The CAR may comprise a single chain antibody (scFv) antigen recognition domain as described herein, which specifically binds to a human leukocyte antigen (HLA). The first polynucleotide and the second polynucleotide may be operably linked to the same promoter. The first polynucleotide may be upstream of the second polynucleotide. The scFv antigen recognition domain may specifically bind to HLA-A2.

[0593] The present invention provides a vector as described herein for use in reducing the risk of generating an engineered T effector cell, preferably during generation of engineered Tregs. Preferably, the engineered T effector cell is an engineered HLA-specific T effector cell and the engineered Tregs are engineered HLA-specific Tregs. More preferably, the engineered T effector cell is an engineered HLA-A2-specific T effector cell and the engineered HLA-specific Tregs are engineered HLA-A2-specific Tregs.

[0594] The present invention provides use of a vector as described herein for reducing the risk of generating an engineered T effector cell, preferably during generation of engineered Tregs. Preferably, the engineered T effector cell is an engineered HLA-specific T effector cell and the engineered Tregs are engineered HLA-specific Tregs. More preferably, the engineered T effector cell is an engineered HLA-A2-specific T effector cell and the engineered HLA-specific Tregs are engineered HLA-A2-specific Tregs.

[0595] The present invention provides a method for reducing the risk of generating an engineered T effector cell, preferably during generation of engineered Tregs, comprising introducing a vector as described herein into the T effector cell. Preferably, the engineered T effector cell is an engineered HLA-specific T effector cell and the engineered Tregs are engineered HLA-specific Tregs. More preferably, the engineered T effector cell is an engineered HLA-A2-specific T effector cell and the engineered HLA-specific Tregs are engineered HLA-A2-specific Tregs.

[0596] The vector may comprise a first polynucleotide encoding a FOXP3 polypeptide as described herein and a second polynucleotide encoding a chimeric antigen receptor (CAR) as described herein, wherein the CAR comprises a single chain antibody (scFv) antigen recognition domain which specifically binds to a human leukocyte antigen (HLA), wherein the first polynucleotide and the second polynucleotide are operably linked to the same promoter, and wherein the first polynucleotide is upstream of the second polynucleotide. The antigen recognition domain may specifically bind to HLA-A2.

[0597] The vector may comprise a first polynucleotide encoding a FOXP3 polypeptide as described herein and a second polynucleotide encoding a chimeric antigen receptor (CAR) as described herein, wherein the CAR comprises an antigen recognition domain which specifically binds to a human leukocyte antigen (HLA), wherein the first polynucleotide and the second polynucleotide are operably linked to the same promoter, wherein the first polynucleotide is upstream of the second polynucleotide and wherein the vector further comprises a polynucleotide encoding a cleavage site as described herein between the first polynucleotide and the second polynucleotide and/or an internal ribosome entry site (IRES) as described herein between the first polynucleotide and the second polynucleotide. The antigen recognition domain may specifically bind to HLA-A2.

[0598] The present invention provides a method for reducing the risk of generating an engineered HLA-specific T effector cell, preferably during generation of engineered HLA-specific Tregs, comprising introducing a first polynucleotide encoding a FOXP3 polypeptide as described herein and a second polynucleotide encoding a HLA-specific CAR as described herein into the T effector cell. Preferably, the engineered HLA-specific T effector cell is an engineered HLA-A2-specific T effector cell, the engineered HLA-specific Tregs are engineered HLA-A2-specific Tregs, and the HLA-specific CAR is a HLA-A2 specific CAR. The HLA-specific CAR may comprise a single chain antibody (scFv) antigen recognition domain.

[0599] The present invention provides a method for reducing the risk of generating an engineered HLA-specific T effector cell, preferably during generation of engineered HLA-specific Tregs, comprising introducing a first polynucleotide encoding a FOXP3 polypeptide as described herein and a second polynucleotide encoding a HLA-specific CAR as described herein into a cell-containing sample, wherein:
[0600] (a) the cell-containing sample comprises T effector cells and/or Tregs; and/or
[0601] (b) the cell-containing sample comprises or consists of peripheral blood mononuclear cells (PBMCs) and Tregs are enriched from the cell-containing sample prior to or after introducing the first polynucleotide and/or second polynucleotide; and/or
[0602] (c) the cell-containing sample comprises or consists of PBMCs and Tregs are generated from the cell-containing sample prior to or after introducing the first polynucleotide and/or the second polynucleotide; and/or
[0603] (d) the cell-containing sample comprises or consists of pluripotent stem cells (PSCs) (e.g. induced pluripotent stem cells (iPSCs) or human embryonic stem cells (hESCs) and Tregs are differentiated from the PSCs prior to or after introducing the first polynucleotide and/or the second polynucleotide.

[0604] Preferably, the engineered HLA-specific T effector cell is an engineered HLA-A2-specific T effector cell, the engineered HLA-specific Tregs are engineered HLA-A2-specific Tregs, and the HLA-specific CAR is a HLA-A2 specific CAR. The HLA-specific CAR may comprise a single chain antibody (scFv) antigen recognition domain.

[0605] Suitably, the first polynucleotide and/or the second polynucleotide are introduced by viral transduction, preferably retroviral or lentiviral transduction.

[0606] Preferably, the first polynucleotide and the second polynucleotide are introduced in a single vector, wherein the first polynucleotide and the second polynucleotide may be operably linked to the same promoter. The vector may be a vector according to the present invention.

[0607] Accordingly, the present invention provides a method for reducing the risk of generating an engineered HLA-specific T effector cell, preferably during generation of engineered HLA-specific Tregs comprising introducing a vector according the present invention into the T effector cell. Preferably, the engineered HLA-specific T effector cell is an engineered HLA-A2-specific T effector cell and the engineered HLA-specific Tregs are engineered HLA-A2-specific Tregs.

[0608] The present invention provides a method for reducing the risk of generating an engineered HLA-specific T effector cell (e.g. an engineered HLA-A2-specific T effector cell), preferably during generation of engineered HLA-specific Tregs (e.g. engineered HLA-A2-specific Tregs) comprising introducing a vector according to the present invention into a cell-containing sample, wherein:
[0609] (a) the cell-containing sample comprises or consists of T effector cells and/or Tregs; and/or
[0610] (b) the cell-containing sample comprises or consists of PBMCs and Tregs are enriched from the cell-containing sample prior to or after introducing the vector; and/or
[0611] (c) the cell-containing sample comprises or consists of PBMCs and Tregs are generated from the cell-containing sample prior to or after introducing the vector; and/or
[0612] (d) the cell-containing sample comprises or consists of pluripotent stem cells (PSCs) (e.g. induced pluripotent stem cells (iPSCs) or human embryonic stem cells (hESCs) and Tregs are differentiated from the PSCs prior to or after introducing the first polynucleotide and/or the second polynucleotide.

[0613] Preferably, the vector comprises an HLA-specific CAR. The HLA-specific CAR may be a HLA-A2-specific CAR. The HLA-specific CAR may comprise a single chain antibody (scFv) antigen recognition domain.

[0614] The expression “reducing the risk of generating an engineered T effector cell” may mean to reduce the chance or rate of generating an engineered T effector cell (e.g. a HLA-specific T effector cell or a HLA-A2-specific T effector cell) in comparison to the chance or rate of generating a corresponding engineered T effector cell (e.g. a HLA-specific T effector cell or a HLA-A2-specific T effector cell) which has not been modified by introducing a polynucleotide encoding a FOXP3 polypeptide as described herein and/or a vector as described herein. Preferably the chance or rate is reduced during the generation of engineered Tregs (e.g. a HLA-specific Treg or a HLA-A2-specific Treg). Suitably, the chance is reduced by at least 10%, at least 20%, at least 30%, at least 40%, at least 50%, at least 60%, at least 70%, at least 80%, at least 90%, or 100%. Suitably, the rate is slowed by at least 1.5-fold, at least 2-fold, at least 5-fold, at least 10-fold, at least 20-fold, at least 50-fold, or at least 100-fold.

[0615] Suitably, the number of engineered T effector cells (e.g. HLA-specific T effector cells or HLA-A2-specific T effector cells) generated during generation of engineered Tregs (e.g. HLA-specific Tregs or HLA-A2-specific Tregs) when introducing a polynucleotide encoding a FOXP3 polypeptide or a vector as described herein, may be reduced in comparison to the number of corresponding engineered T effector cells (e.g. HLA-specific T effector cells or HLA-A2-specific T effector cells) generated during generation of corresponding engineered Tregs (e.g. a HLA-specific Tregs or HLA-A2-specific Tregs) when using only a polynucleotide encoding a CAR (e.g. a HLA-specific CAR or a HLA-A2-specific CAR) and not a polynucleotide encoding FOXP3 or vector of the present invention. Suitably, the number of engineered T effector cells (e.g. HLA-specific T effector cells or HLA-A2-specific T effector cells) generated during generation of engineered Tregs (e.g. HLA-specific Tregs or HLA-A2-specific Tregs) may be reduced by at least 10%, at least 20%, at least 30%, at least 40%, at least 50%, at least 60%, at least 70%, at least 80%, at least 90%, or by 100%.

[0616] Pharmaceutical Composition

[0617] There is also provided a pharmaceutical composition comprising a cell of the invention (e.g. an engineered Treg of the invention), or a vector of the invention.

[0618] A pharmaceutical composition is a composition that comprises or consists of a therapeutically effective amount of a pharmaceutically active agent i.e. the vector and/or Treg. It preferably includes a pharmaceutically acceptable carrier, diluent or excipient (including combinations thereof).

[0619] By “pharmaceutically acceptable” is included that the formulation is sterile and pyrogen free. The carrier, diluent, and/or excipient must be “acceptable” in the sense of being compatible with the Treg or vector and not deleterious to the recipients thereof. Typically, the carriers, diluents, and excipients will be saline or infusion media which will be sterile and pyrogen free, however, other acceptable carriers, diluents, and excipients may be used.

[0620] Acceptable carriers, diluents, and excipients for therapeutic use are well known in the pharmaceutical art. The choice of pharmaceutical carrier, excipient or diluent can be selected with regard to the intended route of administration and standard pharmaceutical practice. The pharmaceutical compositions may comprise as—or in addition to—the carrier, excipient or diluent any suitable binder(s), lubricant(s), suspending agent(s), coating agent(s) or solubilising agent(s).

[0621] Examples of pharmaceutically acceptable carriers include, for example, water, salt solutions, alcohol, silicone, waxes, petroleum jelly, vegetable oils, polyethylene glycols, propylene glycol, liposomes, sugars, gelatin, lactose, amylose, magnesium stearate, talc, surfactants, silicic acid, viscous paraffin, perfume oil, fatty acid monoglycerides and diglycerides, petroethral fatty acid esters, hydroxymethyl-cellulose, polyvinylpyrrolidone, and the like.

[0622] The Tregs or pharmaceutical compositions according to the present invention may be administered in a manner appropriate for treating and/or preventing the disease described herein. The quantity and frequency of administration will be determined by such factors as the condition of the subject, and the type and severity of the subject's disease, although appropriate dosages may be determined by clinical trials. The pharmaceutical composition may be formulated accordingly.

[0623] The Treg or pharmaceutical composition as described herein can be administered parenterally, for example, intravenously, or they may be administered by infusion techniques. The Treg or pharmaceutical composition may be administered in the form of a sterile aqueous solution which may contain other substances, for example, enough salts or glucose to make the solution isotonic with blood. The aqueous solution may be suitably buffered (preferably to a pH of from 3 to 9). The pharmaceutical composition may be formulated accordingly. The preparation of suitable parenteral formulations under sterile conditions is readily accomplished by standard pharmaceutical techniques well-known to those skilled in the art.

[0624] The pharmaceutical compositions may comprise Tregs of the invention in infusion media, for example sterile isotonic solution. The pharmaceutical composition may be enclosed in ampoules, disposable syringes or multiple dose vials made of glass or plastic.

[0625] The Treg or pharmaceutical composition may be administered in a single or in multiple doses. Particularly, the Treg or pharmaceutical composition may be administered in a single, one off dose. The pharmaceutical composition may be formulated accordingly.

[0626] The Treg or pharmaceutical composition may be administered at varying doses (e.g. measured in cells/kg or cells/subject). The physician in any event will determine the actual dosage which will be most suitable for any individual subject and it will vary with the age, weight and response of the particular subject. Typically, however, for Tregs of the invention, doses of 5×10⁷ to 3×10⁹ cells, or 10⁸ to 2×10⁹ cells per subject may be administered.

[0627] The Treg may be appropriately modified for use in a pharmaceutical composition. For example, Tregs may be cryopreserved and thawed at an appropriate time, before being infused into a subject.

[0628] The pharmaceutical composition may further comprise one or more other therapeutic agents, such as lympho-depletive agents (e.g. thymoglobulin, campath-1H, anti-CD2 antibodies, anti-CD3 antibodies, anti-CD20 antibodies, cyclophosphamide, fludarabine), inhibitors of mTOR (e.g. sirolimus, everolimus), drugs inhibiting costimulatory pathways (e.g. anti-CD40/CD40L, CTAL4lg), and/or drugs inhibiting specific cytokines (IL-6, IL-17, TNFalpha, IL18).

[0629] The invention further includes the use of kits comprising the Treg, polynucleotides, vector and/or pharmaceutical composition of the present invention. Preferably said kits are for use in the methods and uses as described herein, e.g., the therapeutic methods as described herein. Preferably said kits comprise instructions for use of the kit components.

[0630] Methods for Treating and/or Preventing Disease

[0631] Organ Transplant

[0632] The present invention provides a method of inducing tolerance to a transplant, which comprises the step of administering an engineered Treg or a pharmaceutical composition of the invention to a subject. Suitably, the subject is mammal, preferably human.

[0633] Inducing tolerance to a transplant reduces the level of a recipient's immune response to a donor transplant.

[0634] Accordingly, the present invention provides a method of treating and/or preventing transplant rejection, which comprises the step of administering an engineered Treg or a pharmaceutical composition of the invention to a subject.

[0635] The subject may be a transplant recipient wherein the transplant is selected from liver, kidney, heart, lung, pancreas, intestine, stomach, bone marrow, vascularized composite tissue graft and skin transplant. Suitably, the transplant is a liver transplant.

[0636] The engineered Tregs may be administered to a subject who has not yet rejected the transplant in order to prevent or reduce the likelihood of transplant rejection. The likelihood of transplant rejection may be reduced by at least 10%, at least 20%, at least 30%, at least 40%, or at least 50% compared to a subject in which the engineered Tregs are not administered, or the transplant rejection may be completely prevented.

[0637] The engineered Tregs may be administered to a subject who is not showing any symptoms of transplant rejection in order to reduce the likelihood of appearance of one symptom of transplant rejection such as pain or tenderness at the site of the transplant, flu-like symptoms, fever, weight-changes (e.g. weight gain), and fatigue. The at least one symptom may be reduced by at least 10%, at least 20%, at least 30%, at least 40%, or at least 50% compared to a subject in which the engineered Tregs are not administered, or the at least one symptom may be completely prevented.

[0638] The engineered Tregs or pharmaceutical composition may be administered to a subject with transplant rejection in order to reverse the rejection or slow down progression of the transplant rejection, or to lessen, reduce, or improve at least one symptom of transplant rejection such as pain or tenderness at the site of the transplant, flu-like symptoms, fever, weight-changes (e.g. weight gain), and fatigue. The at least one symptom may be lessened, reduced, or improved by at least 10%, at least 20%, at least 30%, at least 40%, or at least 50%, or the at least one symptom may be completely alleviated.

[0639] The subject may be a transplant recipient undergoing immunosuppression therapy. Suitably, the present invention may reduce the amount of immunosuppressive drugs that a transplant recipient requires, or may enable the discontinuation of immunosuppressive drugs.

[0640] Graft-Versus-Host Disease

[0641] The present invention provides a method of treating and/or preventing graft-versus-host disease (GvHD), which comprises the step of administering an engineered Treg or a pharmaceutical composition of the invention to a subject. Suitably, the subject is mammal, preferably human.

[0642] Suitably, the subject is a transplant recipient. The subject may be a transplant recipient wherein the transplant is selected from liver, kidney, heart, lung, pancreas, intestine, stomach, bone marrow, vascularized composite tissue graft and skin transplant. Suitably, the transplant is bone marrow transplant.

[0643] GvHD is a common complication following the receipt of transplanted tissue from a genetically different person. GvHD is commonly associated with stem cell transplants such as those that occur with bone marrow transplants. GvHD also applies to other forms of transplanted tissues such as liver transplants. White blood cells of the donor's immune system which remain within the donated tissue (the graft) recognize the recipient (the host) as foreign (non-self). The white blood cells present within the transplanted tissue then attack the recipient's body's cells, which leads to GvHD. The GvHD may be acute or chronic. In the classical sense, acute graft-versus-host-disease is characterized by selective damage to the liver, skin, mucosa, and the gastrointestinal tract.

[0644] Suitably, the HLA specific CAR may comprise an antigen binding domain which is capable of specifically binding to a HLA that is present in the recipient but not in the graft (transplant) donor.

[0645] The subject may be undergoing immunosuppression therapy.

[0646] The engineered Tregs may be administered to a subject with GvHD in order to slow down, reduce, or block the progression of the disease. The progression of the disease may be slowed down, reduced, or blocked by at least 10%, at least 20%, at least 30%, at least 40%, or at least 50% compared to a subject in which the engineered Tregs are not administered, or progression of the disease may be completely stopped.

[0647] The engineered Tregs or pharmaceutical composition may be administered to a subject with GvHD in order to lessen, reduce, or improve at least one symptom of GvHD such as skin rashes or itchy skin, jaundice, nausea, vomiting, diarrhea, abdominal cramping, dry or irritated eyes, dry mouth, shortness of breath, difficulty swallowing, weight loss, fatigue and muscle weakness or pain. The at least one symptom may be lessened, reduced, or improved by at least 10%, at least 20%, at least 30%, at least 40%, or at least 50%, or the at least one symptom may be completely alleviated.

[0648] The engineered Tregs may be administered to a subject who has not yet contracted and/or who is not showing any symptoms of GvHD in order to prevent or reduce the likelihood of contracting GvHD. The engineered Tregs reduce the likelihood or prevent at least one symptom of GvHD such as skin rashes or itchy skin, jaundice, nausea, vomiting, diarrhea, abdominal cramping, dry or irritated eyes, dry mouth, shortness of breath, difficulty swallowing, weight loss, fatigue and muscle weakness or pain. The at least one symptom may be reduced by at least 10%, at least 20%, at least 30%, at least 40%, or at least 50% compared to a subject in which the engineered Tregs are not administered, or the at least one symptom may be completely prevented.

[0649] Suitably, the therapeutic methods of the invention may comprise the step of administering an engineered Treg according to the invention, or obtainable (e.g. obtained) by a method according to the present invention.

[0650] Suitably, the present methods for treating and/or preventing a disease may comprise administering an engineered Treg according to the present invention (for example in a pharmaceutical composition as described herein) to a subject.

[0651] The method may involve the steps of:
[0652] (i) isolating a cell-containing sample or providing a cell-containing sample;
[0653] (ii) introducing polynucleotide(s) or a vector as defined herein to the cells; and
[0654] (iii) administering the cells from (ii) to a subject.

[0655] Suitably, the cell is a Treg as defined herein.

[0656] Suitably, an enriched Treg population may be isolated from and/or generated from the cell-containing sample prior to and/or after step (ii) of the method. For example, isolation and/or generation may be performed prior to and/or after step (ii) to isolate and/or generate an enriched Treg sample. Enrichment may be performed after step (ii) to enrich for cells and/or Tregs comprising the CAR, the polynucleotide(s), and/or the vector of the present invention.

[0657] Suitably, the polynucleotide(s) or vector may be introduced by transduction and/or transfection.

[0658] Suitably, the cell may be autologous and/or allogenic.

[0659] Suitably, the engineered Treg may be administered is combination with one or more other therapeutic agents, such as lympho-depletive agents (e.g. thymoglobulin, campath-1H, anti-CD2 antibodies, anti-CD3 antibodies, anti-CD20 antibodies, cyclophosphamide, fludarabine), inhibitors of mTOR (e.g. sirolimus, everolimus), drugs inhibiting costimulatory pathways (e.g. anti-CD40/CD40L, CTAL4lg), and/or drugs inhibiting specific cytokines (IL-6, IL-17, TNFalpha, IL18). The engineered Treg may be administered simultaneously with or sequentially with (i.e. prior to or after) the one or more other therapeutic agents.

### EXAMPLES

[0660] The invention will now be further described by way of Examples, which are meant to serve to assist one of ordinary skill in the art in carrying out the invention and are not intended in any way to limit the scope of the invention.

### Example 1A—Isolation of Natural Tregs

[0661] CD4+ T cells were isolated using a CD4+ Positive selection kit. Cells were subsequently stained with flow cytometry antibodies CD4, CD25 and CD127 before FACS sorting using the BD ARIA. CD4+CD25hiCD127− Treg and CD4+CD25-CD127+ Tconv were collected in polypropylene tubes. Purity of cell sorting was determined by addition of FOXP3 PE antibody. Purity of CD4+CD25+CD127-FOXP3+ cells was routinely >70%.

### Example 1B—Transduction of Natural Tregs with FOXP3

[0662] On day 0 FACS sorted Treg and Tconv were activated separately for 48 hours by culturing 1:1 with anti-CD3 and anti-CD28 beads. On day 2 cells were counted and resuspended in complete RPMI (Tconv) or Texmacs media (Treg) at 1×10⁶/mL. Non-tissue culture-treated 24-well plates were pre-prepared by coating with retronectin then subsequently blocked with 2 bovine serum albumin in PBS and washed ×2 with PBS. Final concentration of IL-2 was 300 μ/ml for Tconv and 1000 μ/ml for Treg. Cells were incubated overnight at 37° C. before removing supernatant and supplementing with fresh complete media and IL-2. Media was changed on alternate days.

[0663] Tconv cells were grown in RPMI-1640 (Gibco) supplemented with 10% heat inactivated foetal bovine serum; 100 Units/mL penicillin; 100 μg/mL streptomycin; 2 mM L-glutamine. Regulatory T cells were cultured in Texmacs media (Miltenyi) supplemented with 100 Units/mL penicillin; 100 μg/mL streptomycin.

[0664] Flow cytometric analysis was performed at day 7-10 to assess level of transduction through expression of murine TCR constant regions and FOXP3.

### Example 1C—Proliferation and IL-2 Production of Stimulated Tconv Cells in the Presence of FOXP3-Transduced Natural Tregs

[0665] On day 10 Chinese Hamster Ovary (CHO) cells transduced with human HLA-DR4 and CD80 or CD86 were loaded with (10 μM/ml) of MBP111-129 (LSRFSWGAEGQRPGFGYGG). Suspensions were incubated for 2 hours at standard tissue culture conditions before being irradiated, washed and re-suspended at appropriate concentration.

[0666] Transduced responder T cells were stained with CFSE cell trace dye in warmed PBS at 37° C. for 3 minutes before addition of equal volumes of warm FBS and a further 3 minute incubation. Cells were washed in 5× volume of complete RPMI media before counting and resuspension at 1×10⁶ transduced cells/ml. Regulatory T cells were removed from culture, washed and re-suspended at 1×10⁶ transduced cells/ml in complete RPMI. Cells were plated 1 Treg: 0.1 CHO cells: varying ratios of Tconv for 4 days.

[0667] On day 4 cells were stained with a viability dye and analysed by flow cytometry. Percentage proliferation was determined by gating on ‘live’ cells and then the population of cells which had lower CFSE fluorescence relative to cells that were cultured without peptide.

[0668] FIG. 1 shows the proliferation of TCR transduced Tconv cells with and without peptide (blue bars) and the proliferation of the same cells in the presence of Mock Treg (white bars), TCR transduced Treg or TCR+FOXP3 transduced Treg.

[0669] On day 4 supernatant was collected and assayed for IL-2 production by ELISA.

[0670] FIG. 2 shows the IL-2 production of TCR transduced Tconv cells with and without peptide (blue bars) and the proliferation of the same cells in the presence of Mock Treg (white bars), TCR transduced Treg or TCR+FOXP3 transduced Treg.

### Example 2—T Cells from a Different Donor

[0671] The experiment described in Example 1 was repeated using T cells from a different donor.

[0672] FIG. 3 shows percentage proliferation of TCR transduced T cells.

[0673] FIG. 4 shows the concentration of IL-2 in supernatants collected from co-culture experiments.

### Example 3—Expression of Treg Markers in Transduced Natural Tregs

[0674] Mock-transduced Tregs or Tregs transduced with TCR or TCR+FOXP3 were analysed by flow cytometry for the expression of Treg markers (FOXP3, CD25 and CTLA-4) at day 7-10.

[0675] FIG. 5 shows the mean fluorescence intensity (MFI) of each marker. Dots are representative of individual experiments. 1-way ANOVA was used for statistical analysis p<0.05*, p<0.005**.

[0676] FIG. 6 represents the same data differently. Each line represents a single experiment showing MFI of markers on the same Treg transduced with TCR or TCR+FOXP3.

### Example 4—Transduced Natural Tregs Compared to Induced Tregs

[0677] CD80⁺CD86⁺DR4⁺ CHO cells were loaded with peptide and irradiated as described in Example 10 before being re-suspended at 0.1×10⁶ cells/ml. Transduced responder T cells were stained with CFSE cell trace dye in warmed PBS at 37° C. for 3 minutes before addition of equal volumes of warm FBS and a further 3 minute incubation.

[0678] Cells were washed in 5× volume of complete media before being counted and resuspended at 1×10⁶ transduced cells/ml. The transduction efficiency of Tconv and Treg were determined by flow cytometry. Tregs were removed from culture, washed and resuspended at 1×10⁶ transduced cells/ml in complete RPMI. Cells were plated 1 Treg: 0.1 CHO cells: varying parts Tconv. Proliferation was determined by analysing dilution of carboxyfluorescein succinimidyl ester (CFSE)-stained Tconv.

[0679] The data in FIG. 7 show that TCR+FOXP3-transduced natural Tregs suppress proliferation more effectively than TCR+FOXP3-transduced Tconv cells (i.e. induced Tregs).

[0680] Supernatants were collected from the culture media and were assayed for IL-2 by ELISA. The data presented in FIG. 8 show that TCR+FOXP3-transduced natural Tregs suppress IL-2 production more effectively than TCR+FOXP3-transduced Tconv cells (i.e. induced Tregs).

### Example 5A—Treg Expressing Exogenous FOXP3 Engraft, Persist and Retain FoxP3, CD25 and TCR Expression

[0681] Thy1.1+CD4+CD25+ or CD45.1+CD4+CD25+ Treg were isolated from lymph nodes and splenocytes of HLA-DRB*0401 transgenic mice by bead sort. CD45.1+ Treg were transduced with TCR and Thy1.1+ Treg were transduced with TCR+murine FOXP3.1 day after transduction TCR or TCR+FOXP3 transduced cells were injected in a 1:1 ratio into HLA-DRB*0401 transgenic hosts conditioned with 4Gy irradiation. FACS plots show the ratio of CD45.1:Thy1.1 of injected cells and their respective FOXP3 expression.

[0682] After 7 weeks flow cytometry was used to identify engrafted cells by staining for TCR. The ratio of CD45.1:Thy1.1 within the TCR+ population was determined and the phenotype of engrafted CD45.1 (Treg transduced with TCR) or Thy1.1 (Treg transduced with TCR+FOXP3) cells was examined by staining for FOXP3 and CD25. Thy1.1+CD4+CD25+ Treg were isolated from lymph nodes and splenocytes of HLA-DRB*0401 transgenic mice by bead sort. Treg were transduced TCR, TCR+murine FOXP3 or cultured with virus-free supernatant (mock). 1 day after transduction TCR or TCR+FOXP3 transduced cells were injected into HLA-DRB*0401 transgenic hosts conditioned with 4Gy irradiation. 7 weeks later flow cytometry was used to determine the engraftment of transduced Treg FIG. 9, A shows the transduction efficiency determined through expression of human variable 2.1 and murine Foxp3 on dl post-transduction. FIG. 9, B shows splenocytes from mice that received Treg transduced with TCR or TCR+FOXP3 stained with Thy1.1 to identify transferred cells (top panel) and FOXP3 and TCR (bottom panel). FIG. 9, C shows cumulative data showing fold change in transduction efficiency (left panel) and fold change in absolute number of transduced cells (right panel) relative to day of injection for Treg transduced with TCR or TCR+FOXP3. FIG. 9, D shows a representative expression of FOXP3 within transduced cells 7 weeks after transfer. Graphs show cumulative of percentage FOXP3+ cells within the transduced population at week 7 (left) and the fold change in FOXP3+ cells relative to the day of injection.

### Example 5B—Treg Expressing Exogenous FOXP3 Retain Treg Functionality after 7 Weeks In Vivo Whilst Tregs not Expressing Exogenous FOXP3 Acquire the Ability to Produce Effector Cytokines

[0683] Splenocytes were cultured for 4 hours with CD86+HLA-DR4+CHO cells pulsed with irrelevant peptide or 10 uM MBP. Treg expressing exogenous FOXP3 retain Treg functionality after 7 weeks in vivo as demonstrated by lack of effector cytokine production, whilst Tregs not expressing exogenous FOXP3 acquire the ability to produce effector cytokines (FIG. 10).

[0684] Although Examples 1-5 were exemplified using a TCR, the results are broadly applicable, for example to other TCR constructs or CAR constructs, e.g. comprising an antigen-binding domain which targets HLA-A2.

### Example 6A—Tregs Transduced with a Construct Encoding FOXP3 and an HLA-A2 Specific CAR Express Both Genes and Express FOXP3 at Noticeably Higher Levels than Tregs with Endogenous FOXP3 Only

[0685] Tregs were isolated from PBMCs by CD4+ and CD25+ enrichment. The enriched cells were stained for CD4, CD25, CD127 and CD45RA and sorted by FACS.

[0686] Enriched Tregs were transduced with one of four constructs. FIG. 11A shows a schematic diagram of the constructs used: Construct F-C: illustrates a construct encoding 5′-FOXP3-P2A-A2 CAR-3′; Construct R-C: illustrates a construct encoding 5′-R-P2A-A2 CAR-3′, where R is another gene; Construct C: illustrates a construct encoding the A2 CAR only; Construct C-R: illustrates a construct encoding 5′-A2 CAR-P2A-R-3′, where R is another gene.

[0687] FIG. 11B shows a schematic of the transduction method.

[0688] The enriched and transduced cells were expanded using the following protocol:
[0689] Day 0, 0.25×10⁶ per ml in TexMACS™ with Gibco™ Dynabeads™ Human T-Activator CD3/CD28
[0690] Day 2, 0.1×10⁶ per ml in TexMACS™ on retronectin coated plates with IL-2 and virus
[0691] Day 4-9, resuspension to 0.25×10⁶ per ml in TexMACS™ with IL-2 in T25 flasks/6 well plates
[0692] Day 15, resuspension to 0.25×10⁶ per ml in TexMACS™ with IL-2 in T25 flasks

[0693] FIG. 12 shows the HLA-A2-specific CAR (A2 CAR) expression levels, FOXP3 expression levels and the expression levels of another gene, R, in Tregs transduced with Construct F-C, Construct R-C, Construct C, and Construct C-R, compared to mock control Tregs, as determined by flow cytometry.

[0694] FIG. 12A shows that Tregs transduced with each construct expressed the HLA-A2-specific CAR. The HLA-A2-specific CAR was expressed from both constructs in which the CAR was downstream (Construct R-C) and when the CAR was upstream (Construct C-R).

[0695] FIG. 12B shows that FOXP3 was expressed in all Tregs, but was noticeably higher in Construct F-C, particularly when compared to expression of the HLA-A2-specific CAR alone (Construct C).

### Example 6B—Tregs Transduced with a Construct Encoding FOXP3 and an HLA-A2 Specific CAR Retain FOXP3 Expression

[0696] FIG. 13 shows the HLA-A2-specific CAR (A2 CAR) expression levels, FOXP3 expression levels and the expression levels of another gene, R, in extended expanded Tregs transduced with Construct F-C, Construct R-C, Construct C, and Construct C-R, compared to mock control Tregs, as determined by flow cytometry.

[0697] FIG. 13A shows that Tregs transduced with each construct still expressed the HLA-A2-specific CAR after extended expansion.

[0698] FIG. 13B shows that FOXP3 expression decreased in Tregs transduced with Construct R-C, Construct C, and Construct C-R after extended expansion. In contrast, FOXP3 expression did not decrease in Tregs transduced Construct F-C after extended expansion. Consequently, FOXP3 expression was substantially higher in Construct F-C after extended expansion, particularly when compared to expression of the HLA-A2-specific CAR alone (Construct C).

### Example 7—Tregs Transduced with a Construct Encoding FOXP3 and an HLA-A2 Specific CAR Maintain Treg Phenotypic Lineage while Enhancing FOXP3 Expression

[0699] CD4⁺CD25⁺CD127⁻ Tregs were FACs sorted, activated, transduced and expanded as described in Example 6A, except that the media used in the expansion protocol was switched to X-VIVO-15™ with 5% AB serum (rather than TexMACS™) and the concentration of cells at day 0 was 0.2×10⁶ per ml (rather than 0.25×10⁶ per ml).

[0700] T cells were then removed from culture and stained for the HLA-A2 specific CAR and live cells using the dextramer and LIVE/DEAD™ Fixable Near-IR. Consequently, surface staining of the cells was performed in Brilliant stain buffer (BD) containing the following antibodies; anti-CD25 PE-Cy7, anti-CD62L PE-CF594, anti-TIGIT BV605, anti-CD45RO BUV395, and anti-CD223 BV711 for 20-30 minutes at 4° C. in the dark. Cells were then washed with FACS buffer and resuspended in fixation/permeabilization solution. The cells were incubated at 4° C. for 30 min in the dark. Permeabilised cells were then washed with 1×permeabilization buffer and resuspended in 50 μL of 1× permeabilization buffer containing anti-CTLA-4 BV421 and anti-Foxp3 PE for 30 min in the dark at 4° C. Cells were then washed with 1× permeabilization buffer, resuspended in FACS buffer and analysed by flow cytometry.

[0701] In each sample, transduced (TD) cells were identified as dextramer+ and the remaining cells were considered non-transduced (NTD); mean fluorescence intensity (MFI) for each phenotypic lineage marker was determined in the TD and NTD cells. 2⁰ represents no change, 2¹ represents two-fold increased expression.

[0702] FIG. 14 shows phenotypic lineage marker expression in Tregs transduced with Construct F-C, Construct R-C, Construct C, and Construct C-R. Tregs transduced with construct F-C maintain Treg phenotypic lineage while enhancing FOXP3 expression.

[0703] All publications mentioned in the above specification are herein incorporated by reference. Various modifications and variations of the disclosed methods, cells, compositions and uses of the invention will be apparent to the skilled person without departing from the scope and spirit of the invention. Although the invention has been disclosed in connection with specific preferred embodiments, it should be understood that the invention as claimed should not be unduly limited to such specific embodiments. Indeed, various modifications of the disclosed modes for carrying out the invention, which are obvious to the skilled person are intended to be within the scope of the following claims.

1-51. (canceled)

51. A vector comprising a first polynucleotide encoding a FOXP3 polypeptide and a second polynucleotide encoding a chimeric antigen receptor (CAR), wherein the CAR comprises an antigen recognition domain which specifically binds to a human leukocyte antigen (HLA), wherein the first polynucleotide and the second polynucleotide are operably linked to the same promoter, and wherein the first polynucleotide is upstream of the second polynucleotide.

52. The vector according to claim 51, wherein the antigen recognition domain specifically binds to HLA-A2.

53. The vector according to claim 51, wherein:
(a) the vector comprises a polynucleotide encoding a cleavage site between the first polynucleotide and the second polynucleotide and/or an internal ribosome entry site (IRES) between the first polynucleotide and the second polynucleotide; and/or
(b) the vector comprises a self-cleaving sequence between the first polynucleotide and the second polynucleotide, preferably wherein the self-cleaving sequence is a polynucleotide sequence encoding a 2A self-cleaving peptide, optionally wherein the 2A self-cleaving peptide is selected from the group consisting of: P2A peptide, T2A peptide, E2A peptide, and F2A peptide; and/or
(c) the vector is a viral vector, preferably a retroviral vector or a lentiviral vector; and/or
(d) the promoter is a long terminal repeat (LTR).

54. The vector according to claim 51, wherein:
(a) the FOXP3 polypeptide comprises or consists of an amino acid sequence which has at least 70%, 80%, 85%, 90%, 95%, 98%, 99% or 100% identity to SEQ ID NOs: 1 or 2, or a functional fragment thereof; and/or
(b) the first polynucleotide comprises or consists of a polynucleotide sequence which has at least 70%, 80%, 85%, 90%, 95%, 98%, 99% or 100% identity to SEQ ID NOs: 3 or 4, or a functional fragment thereof; and/or
(c) the second polynucleotide comprises a polynucleotide sequence which has at least 70%, 80%, 85%, 90%, 95%, 98%, 99% or 100% identity to SEQ ID NO: 211 or SEQ ID NO: 212.

55. The vector according to claim 51, wherein the antigen recognition domain:
(a) is an antibody, an antibody fragment, or derived from an antibody; and/or
(b) is an antigen-binding fragment (Fab), a single chain antibody (scFv), or a single-domain antibody (sdAb); and/or
(c) comprises one or more CDR regions selected from SEQ ID NOs: 5-133 or derivatives thereof comprising one, two, or three amino acid substitutions; and/or
(d) comprises CDR1, CDR2 and CDR3 regions comprising or consisting of: SEQ ID NOs: 5-7, respectively; SEQ ID NOs: 8-10, respectively; SEQ ID NOs: 11-13, respectively; SEQ ID NOs: 14-16, respectively; SEQ ID NOs: 17-19, respectively; SEQ ID NOs: 20-22, respectively; SEQ ID NOs: 23-25, respectively; SEQ ID NOs: 26-28, respectively; SEQ ID NOs: 29-31, respectively; SEQ ID NOs: 32-34, respectively; SEQ ID NOs: 35-37, respectively; SEQ ID NOs: 38-40, respectively; SEQ ID NOs: 41-43, respectively; SEQ ID NOs: 44-46, respectively; SEQ ID NOs: 47-49, respectively; SEQ ID NOs: 50-52, respectively; SEQ ID NOs: 53-55, respectively; SEQ ID NOs: 56-58, respectively; SEQ ID NOs: 59-61, respectively; SEQ ID NOs: 62-64, respectively; SEQ ID NOs: 65-67, respectively; SEQ ID NOs: 68-70, respectively; SEQ ID NOs: 71-73, respectively; SEQ ID NOs: 74-76, respectively; SEQ ID NOs: 77-79, respectively; SEQ ID NOs: 80-82, respectively; SEQ ID NOs: 83-85, respectively; SEQ ID NOs: 86-88, respectively; SEQ ID NOs: 89-91, respectively; SEQ ID NOs: 92-94, respectively; SEQ ID NOs: 95-97, respectively; SEQ ID NOs: 98-100, respectively; SEQ ID NOs: 101-103, respectively; SEQ ID NOs: 104-106, respectively; SEQ ID NOs: 107-109, respectively; SEQ ID NOs: 110-112, respectively; SEQ ID NOs: 113-115, respectively; SEQ ID NOs: 116-118, respectively; SEQ ID NOs: 119-121, respectively; SEQ ID NOs: 122-124, respectively; SEQ ID NOs: 125-127, respectively; SEQ ID NOs: 128-130, respectively; and/or SEQ ID NOs: 131-133, respectively.

56. The vector according to claim 51, wherein the antigen recognition domain:
(a) comprises:
(i) a variable heavy domain which comprises CDR1, CDR2 and CDR3 regions comprising or consisting of SEQ ID NOs: 5-7, respectively, and a variable light domain which comprises CDR1, CDR2 and CDR3 regions comprising or consisting of SEQ ID NOs: 17-19, respectively;
(ii) a variable heavy domain which comprises CDR1, CDR2 and CDR3 regions comprising or consisting of SEQ ID NOs: 8-10, respectively, and a variable light domain which comprises CDR1, CDR2 and CDR3 regions comprising or consisting of SEQ ID NOs: 20-22, respectively;
(iii) a variable heavy domain which comprises CDR1, CDR2 and CDR3 regions comprising or consisting of SEQ ID NOs: 11-13, respectively, and a variable light domain which comprises CDR1, CDR2 and CDR3 regions comprising or consisting of SEQ ID NOs: 23-25, respectively;
(iv) a variable heavy domain which comprises CDR1, CDR2 and CDR3 regions comprising or consisting of SEQ ID NOs: 14-16, respectively, and a variable light domain which comprises CDR1, CDR2 and CDR3 regions comprising or consisting of SEQ ID NOs: 26-28, respectively;
(v) a variable heavy domain which comprises CDR1, CDR2 and CDR3 regions comprising or consisting of SEQ ID NOs: 14-16, respectively, and a variable light domain which comprises CDR1, CDR2 and CDR3 regions comprising or consisting of SEQ ID NOs: 29-31, respectively;
(vi) a variable heavy domain which comprises CDR1, CDR2 and CDR3 regions comprising or consisting of SEQ ID NOs: 14-16, respectively, and a variable light domain which comprises CDR1, CDR2 and CDR3 regions comprising or consisting of SEQ ID NOs: 32-34, respectively;
(vii) a variable heavy domain which comprises CDR1, CDR2 and CDR3 regions comprising or consisting of SEQ ID NOs: 14-16, respectively, and a variable light domain which comprises CDR1, CDR2 and CDR3 regions comprising or consisting of SEQ ID NOs: 35-37, respectively;
(viii) a variable heavy domain which comprises CDR1, CDR2 and CDR3 regions comprising or consisting of SEQ ID NOs: 14-16, respectively, and a variable light domain which comprises CDR1, CDR2 and CDR3 regions comprising or consisting of SEQ ID NOs: 38-40, respectively;
(ix) a variable heavy domain which comprises CDR1, CDR2 and CDR3 regions comprising or consisting of SEQ ID NOs: 14-16, respectively, and a variable light domain which comprises CDR1, CDR2 and CDR3 regions comprising or consisting of SEQ ID NOs: 41-43, respectively;
(x) a variable heavy domain which comprises CDR1, CDR2 and CDR3 regions comprising or consisting of SEQ ID NOs: 14-16, respectively, and a variable light domain which comprises CDR1, CDR2 and CDR3 regions comprising or consisting of SEQ ID NOs: 44-46, respectively;
(xi) a variable heavy domain which comprises CDR1, CDR2 and CDR3 regions comprising or consisting of SEQ ID NOs: 14-16, respectively, and a variable light domain which comprises CDR1, CDR2 and CDR3 regions comprising or consisting of SEQ ID NOs: 47-49, respectively;
(xii) a variable heavy domain which comprises CDR1, CDR2 and CDR3 regions comprising or consisting of SEQ ID NOs: 14-16, respectively, and a variable light domain which comprises CDR1, CDR2 and CDR3 regions comprising or consisting of SEQ ID NOs: 50-52, respectively;
(xiii) a variable heavy domain which comprises CDR1, CDR2 and CDR3 regions comprising or consisting of SEQ ID NOs: 14-16, respectively, and a variable light domain which comprises CDR1, CDR2 and CDR3 regions comprising or consisting of SEQ ID NOs: 53-55, respectively;
(xiv) a variable heavy domain which comprises CDR1, CDR2 and CDR3 regions comprising or consisting of SEQ ID NOs: 14-16, respectively, and a variable light domain which comprises CDR1, CDR2 and CDR3 regions comprising or consisting of SEQ ID NOs: 56-58, respectively;
(xv) a variable heavy domain which comprises CDR1, CDR2 and CDR3 regions comprising or consisting of SEQ ID NOs: 14-16, respectively, and a variable light domain which comprises CDR1, CDR2 and CDR3 regions comprising or consisting of SEQ ID NOs: 59-61, respectively;
(xvi) a variable heavy domain which comprises CDR1, CDR2 and CDR3 regions comprising or consisting of SEQ ID NOs: 62-64, respectively, and a variable light domain which comprises CDR1, CDR2 and CDR3 regions comprising or consisting of SEQ ID NOs: 98-100, respectively;
(xvii) a variable heavy domain which comprises CDR1, CDR2 and CDR3 regions comprising or consisting of SEQ ID NOs: 65-67, respectively, and a variable light domain which comprises CDR1, CDR2 and CDR3 regions comprising or consisting of SEQ ID NOs: 101-103, respectively;
(xviii) a variable heavy domain which comprises CDR1, CDR2 and CDR3 regions comprising or consisting of SEQ ID NOs: 68-70, respectively, and a variable light domain which comprises CDR1, CDR2 and CDR3 regions comprising or consisting of SEQ ID NOs: 104-106, respectively;
(xix) a variable heavy domain which comprises CDR1, CDR2 and CDR3 regions comprising or consisting of SEQ ID NOs: 71-73, respectively, and a variable light domain which comprises CDR1, CDR2 and CDR3 regions comprising or consisting of SEQ ID NOs: 107-109, respectively;
(xx) a variable heavy domain which comprises CDR1, CDR2 and CDR3 regions comprising or consisting of SEQ ID NOs: 74-76, respectively, and a variable light domain which comprises CDR1, CDR2 and CDR3 regions comprising or consisting of SEQ ID NOs: 110-112, respectively;
(xxi) a variable heavy domain which comprises CDR1, CDR2 and CDR3 regions comprising or consisting of SEQ ID NOs: 77-79, respectively, and a variable light domain which comprises CDR1, CDR2 and CDR3 regions comprising or consisting of SEQ ID NOs: 113-115, respectively;
(xxii) a variable heavy domain which comprises CDR1, CDR2 and CDR3 regions comprising or consisting of SEQ ID NOs: 80-82, respectively, and a variable light domain which comprises CDR1, CDR2 and CDR3 regions comprising or consisting of SEQ ID NOs: 116-118, respectively;
(xxiii) a variable heavy domain which comprises CDR1, CDR2 and CDR3 regions comprising or consisting of SEQ ID NOs: 83-85, respectively, and a variable light domain which comprises CDR1, CDR2 and CDR3 regions comprising or consisting of SEQ ID NOs: 119-121, respectively;
(xxiv) a variable heavy domain which comprises CDR1, CDR2 and CDR3 regions comprising or consisting of SEQ ID NOs: 86-88, respectively, and a variable light domain which comprises CDR1, CDR2 and CDR3 regions comprising or consisting of SEQ ID NOs: 122-124, respectively;
(xxv) a variable heavy domain which comprises CDR1, CDR2 and CDR3 regions comprising or consisting of SEQ ID NOs: 89-91, respectively, and a variable light domain which comprises CDR1, CDR2 and CDR3 regions comprising or consisting of SEQ ID NOs: 125-127, respectively;
(xxvi) a variable heavy domain which comprises CDR1, CDR2 and CDR3 regions comprising or consisting of SEQ ID NOs: 92-94, respectively, and a variable light domain which comprises CDR1, CDR2 and CDR3 regions comprising or consisting of SEQ ID NOs: 128-130, respectively; or
(xxvii) a variable heavy domain which comprises CDR1, CDR2 and CDR3 regions comprising or consisting of SEQ ID NOs: 95-97, respectively, and a variable light domain which comprises CDR1, CDR2 and CDR3 regions comprising or consisting of SEQ ID NOs: 131-133, respectively; and/or
(b) comprises a variable heavy domain which has at least about 80%, 85%, 90%, 95%, 98%, 99%, or 100% identity to one or more of SEQ ID NOs: 134-149 and/or comprises a variable light domain which has at least about 80%, 85%, 90%, 95%, 98%, 99%, or 100% identity to one or more of SEQ ID NOs: 150-176; and/or
(c) comprises or consists of an amino acid sequence which has at least 80%, 85%, 90%, 95%, 98%, 99% or 100% identity to one or more of SEQ ID NOs: 177-203.

57. The vector according to claim 51, wherein:
(a) the CAR comprises a transmembrane (TM) domain and an intracellular signalling domain, and optionally wherein the CAR comprises a hinge domain and/or one or more co-stimulatory domains; and/or
(b) the CAR comprises one or more hinge domains selected from the group consisting of a CD28 hinge domain, a CD8 hinge domain, an IgG hinge domain, and an IgD hinge domain, preferably wherein the CAR comprises a CD8 hinge domain; and/or
(c) the CAR comprises one or more TM domains selected from the group consisting of a CD28 TM domain, an ICOS TM domain, a CD8 TM domain, a CD4 TM domain, an OX40 TM domain, a 4-1BB TM domain, and a CD3 zeta TM domain, preferably wherein the CAR comprises a CD8 TM domain; and/or
(d) the CAR comprises one or more co-stimulatory domains selected from the group consisting of a CD28 signalling domain, an ICOS signalling domain, an OX40 signalling domain, a 4-1BB signalling domain, a CD27 signalling domain, or a TNFRSF25 signalling domain, preferably wherein the CAR comprises a CD28 signalling domain; and/or
(e) the CAR comprises one or more intracellular signalling domains selected from the group consisting of a CD3 zeta signalling domain or any of its homologs, a CD3 polypeptide, a syk family tyrosine kinase, a src family tyrosine kinase, a CD2 signalling domain, a CD5 signalling domain and a CD8 signalling domain, preferably wherein the CAR comprises a CD3 zeta signalling domain; and/or
(f) the CAR comprises: a CD8 hinge domain; a CD8 TM domain; a CD28 signalling domain; and a CD3 zeta signalling domain; and/or
(g) the CAR comprises an amino acid sequence which has at least 80%, 85%, 90%, 95%, 98%, 99% or 100% identity to SEQ ID NO: 209 or SEQ ID NO: 210.

58. The vector according to claim 51, wherein the vector comprises:
(i) a first polynucleotide which comprises or consists of a polynucleotide sequence which has at least 70% identity to SEQ ID NO: 3, or a functional fragment thereof, optionally a self-cleaving sequence which has at least 70% identity to SEQ ID NO: 214, and a second polynucleotide which comprises a polynucleotide sequence which has at least 70% identity to SEQ ID NO: 211;
(ii) a first polynucleotide which comprises or consists of a polynucleotide sequence which has at least 70% identity to SEQ ID NO: 3, or a functional fragment thereof, optionally a self-cleaving sequence which has at least 70% identity to SEQ ID NO: 214, and a second polynucleotide which comprises a polynucleotide sequence which has at least 70% identity to SEQ ID NO: 212;
(iii) a first polynucleotide which comprises or consists of a polynucleotide sequence which has at least 70% identity to SEQ ID NO: 4, or a functional fragment thereof, optionally a self-cleaving sequence which has at least 70% identity to SEQ ID NO: 214, and a second polynucleotide which comprises a polynucleotide sequence which has at least 70% identity to SEQ ID NO: 211; or
(iv) a first polynucleotide which comprises or consists of a polynucleotide sequence which has at least 70% identity to SEQ ID NO: 4, or a functional fragment thereof, optionally a self-cleaving sequence which has at least 70% identity to SEQ ID NO: 214, and a second polynucleotide which comprises a polynucleotide sequence which has at least 70% identity to SEQ ID NO: 212.

59. An engineered T cell comprising a vector according to claim 51.

60. The engineered T cell according to claim 59, wherein the engineered T cell is an engineered regulatory T cell (Treg).

61. A method for enhancing the ability of an engineered HLA-specific Treg to suppress an immune response which comprises the step of introducing into the Treg a polynucleotide encoding a FOXP3 polypeptide or a vector according to claim 51, wherein the immune response is preferably an immune response against a cell expressing the HLA, preferably wherein the HLA is HLA-A2.

62. A method for enhancing the ability of an engineered HLA-specific Treg to suppress an immune response comprising introducing a first polynucleotide encoding a FOXP3 polypeptide and a second polynucleotide encoding a HLA-specific CAR into:
(a) the Treg or
(b) a cell-containing sample, wherein:
(i) the cell-containing sample comprises or consists of Tregs; and/or
(ii) the cell-containing sample comprises or consists of peripheral blood mononuclear cells (PBMCs) and Tregs are enriched from the cell-containing sample prior to or after introducing the first polynucleotide and/or second polynucleotide; and/or
(iii) the cell-containing sample comprises or consists of PBMCs and Tregs are generated from the cell-containing sample prior to or after introducing the first polynucleotide and/or the second polynucleotide,
preferably wherein the HLA is HLA-A2.

63. The method according to claim 62, wherein:
(a) the first polynucleotide and/or the second polynucleotide are introduced by viral transduction, preferably retroviral or lentiviral transduction; and/or
(b) the first polynucleotide and the second polynucleotide are introduced in a single vector, optionally wherein the first polynucleotide and the second polynucleotide are operably linked to the same promoter; and/or
(c) the method comprises introducing a vector comprising the first and second polynucleotides, wherein the first polynucleotide and the second polynucleotide are operably linked to the same promoter, and wherein the first polynucleotide is upstream of the second polynucleotide.

64. A method of reducing the risk of (i) an engineered HLA-specific Treg acquiring an effector phenotype and/or (ii) generating an engineered HLA-specific T effector cell during generation of engineered HLA-specific Tregs, which method comprises a step of introducing into the Treg a polynucleotide encoding a FOXP3 polypeptide or a vector according to claim 51, preferably wherein the HLA is HLA-A2.

65. A method for reducing the risk of (i) an engineered HLA-specific Treg acquiring an effector phenotype; and/or (ii) generating an engineered HLA-specific T effector cell during generation of engineered HLA-specific Tregs, comprising introducing a vector according to claim into a cell-containing sample, wherein:
(a) the cell-containing sample comprises or consists of Tregs and/or effector cells; and/or
(b) the cell-containing sample comprises or consists of PBMCs and Tregs are enriched from the cell-containing sample prior to or after introducing the vector; and/or
(c) the cell-containing sample comprises or consists of PBMCs and Tregs are generated from the cell-containing sample prior to or after introducing the vector, preferably wherein the HLA is HLA-A2.

66. An engineered Treg obtainable or obtained by a method according to claim 62.

67. A pharmaceutical composition comprising an engineered Treg according to claim 66.

68. A method of inducing tolerance to a transplant in a subject, or treating and/or preventing of transplant rejection or GvHD in a subject, comprising administering an engineered Treg according to claim 66 to the subject.

69. The method of claim 68, wherein the method comprises the following steps:
(i) isolation or provision of a cell-containing sample from the subject, wherein the cell-containing sample comprises or consists of PBMCs; and
(ii) introducing a vector into the cell-containing sample, wherein the vector comprises a first polynucleotide encoding a FOXP3 polypeptide and a second polynucleotide encoding a chimeric antigen receptor (CAR), wherein the CAR comprises an antigen recognition domain which specifically binds to a human leukocyte antigen (HLA), wherein the first polynucleotide and the second polynucleotide are operably linked to the same promoter, and wherein the first polynucleotide is upstream of the second polynucleotide;
wherein the cell-containing sample comprises or consists of Tregs; and/or wherein Tregs are enriched from the cell-containing sample prior to or after introducing the vector; and/or wherein Tregs are generated from the cell-containing sample prior to or after introducing the vector, and optionally wherein the subject is human.

The application's sequence listing, which the Patent Office published only in electronic form, follows.

SEQUENCE LISTING (1033 sequences)

SEQ ID NO: 1 - protein, 431 aa, Homo sapiens
MPNPRPGKPSAPSLALGPSPGASPSWRAAPKASDLLGARGPGGTFQGRDLRGGAHASSSSLNPMPPSQLQLPTLPLVMVAPSGARLGPLPHLQALLQDRPHFMHQLSTVDAHARTPVLQVHPLESPAMISLTPPTTATGVFSLKARPGLPPGINVASLEWVSREPALLCTFPNPSAPRKDSTLSAVPQSSYPLLANGVCKWPGCEKVFEEPEDFLKHCQADHLLDEKGRAQCLLQREMVQSLEQQLVLEKEKLSAMQAHLAGKMALTKASSVASSDKGSCCIVAAGSQGPVVPAWSGPREAPDSLFAVRRHLWGSHGNSTFPEFLHNMDYFKFHNMRPPFTYATLIRWAILEAPEKQRTLNEIYHWFTRMFAFFRNHPATWKNAIRHNLSLHKCFVRVESEKGAVWTVDELEFRKKRSQRPSRCSNPTPGP

SEQ ID NO: 2 - protein, 441 aa, Artificial Sequence
  illustrative FOXP3 polypeptide
MPNPRPGKPSAPSLALGPSPGASPSWRAAPKASDLLGARGPGGTFQGRDLRGGAHASSSSLNPMPPSQLQLPTLPLVMVAPSGARLGPLPHLQALLQDRPHFMHQLSTVDAHARTPVLQVHPLESPAMISLTPPTTATGVFSLKARPGLPPGINVASLEWVSREPALLCTFPNPSAPRKDSTLSAVPQSSYPLLANGVCKWPGCEKVFEEPEDFLKHCQADHLLDEKGRAQCLLQREMVQSLEQVEELSAMQAHLAGKMALTKASSVASSDKGSCCIVAAGSQGPVVPAWSGPREAPDSLFAVRRHLWGSHGNSTFPEFLHNMDYFKFHNMRPPFTYATLIRWAILEAPEKQRTLNEIYHWFTRMFAFFRNHPATWKNAIRHNLSLHKCFVRVESEKGAVWTVDELEFRKKRSQRPSRCSNPTPGPEGRGSLLTCGDVEEN

SEQ ID NO: 3 - DNA, 1296 bp, Artificial Sequence
  illustrative FOXP3 polynucleotide
atgcccaaccccaggcctggcaagccctcggccccttccttggcccttggcccatccccaggagcctcgcccagctggagggctgcacccaaagcctcagacctgctgggggcccggggcccagggggaaccttccagggccgagatcttcgaggcggggcccatgcctcctcttcttccttgaaccccatgccaccatcgcagctgcagctgcccacactgcccctagtcatggtggcaccctccggggcacggctgggccccttgccccacttacaggcactcctccaggacaggccacatttcatgcaccagctctcaacggtggatgcccacgcccggacccctgtgctgcaggtgcaccccctggagagcccagccatgatcagcctcacaccacccaccaccgccactggggtcttctccctcaaggcccggcctggcctcccacctgggatcaacgtggccagcctggaatgggtgtccagggagccggcactgctctgcaccttcccaaatcccagtgcacccaggaaggacagcaccctttcggctgtgccccagagctcctacccactgctggcaaatggtgtctgcaagtggcccggatgtgagaaggtcttcgaagagccagaggacttcctcaagcactgccaggcggaccatcttctggatgagaagggcagggcacaatgtctcctccagagagagatggtacagtctctggagcagcagctggtgctggagaaggagaagctgagtgccatgcaggcccacctggctgggaaaatggcactgaccaaggcttcatctgtggcatcatccgacaagggctcctgctgcatcgtagctgctggcagccaaggccctgtcgtcccagcctggtctggcccccgggaggcccctgacagcctgtttgctgtccggaggcacctgtggggtagccatggaaacagcacattcccagagttcctccacaacatggactacttcaagttccacaacatgcgaccccctttcacctacgccacgctcatccgctgggccatcctggaggctccagagaagcagcggacactcaatgagatctaccactggttcacacgcatgtttgccttcttcagaaaccatcctgccacctggaagaacgccatccgccacaacctgagtctgcacaagtgctttgtgcgggtggagagcgagaagggggctgtgtggaccgtggatgagctggagttccgcaagaaacggagccagaggcccagcaggtgttccaaccctacacctggcccctga

SEQ ID NO: 4 - DNA, 1352 bp, Artificial Sequence
  illustrative FOXP3 polynucleotide
gaattcgtcgacatgcccaaccccagacccggcaagccttctgccccttctctggccctgggaccatctcctggcgcctccccatcttggagagccgcccctaaagccagcgatctgctgggagctagaggccctggcggcacattccagggcagagatctgagaggcggagcccacgcctctagcagcagcctgaatcccatgccccctagccagctgcagctgcctacactgcctctcgtgatggtggcccctagcggagctagactgggccctctgcctcatctgcaggctctgctgcaggaccggccccactttatgcaccagctgagcaccgtggacgcccacgccagaacacctgtgctgcaggtgcaccccctggaaagccctgccatgatcagcctgacccctccaaccacagccaccggcgtgttcagcctgaaggccagacctggactgccccctggcatcaatgtggccagcctggaatgggtgtcccgcgaacctgccctgctgtgcaccttccccaatcctagcgcccccagaaaggacagcacactgtctgccgtgccccagagcagctatcccctgctggctaacggcgtgtgcaagtggcctggctgcgagaaggtgttcgaggaacccgaggacttcctgaagcactgccaggccgaccatctgctggacgagaaaggcagagcccagtgcctgctgcagcgcgagatggtgcagtccctggaacagcagctggtgctggaaaaagaaaagctgagcgccatgcaggcccacctggccggaaagatggccctgacaaaagccagcagcgtggccagctccgacaagggcagctgttgtatcgtggccgctggcagccagggacctgtggtgcctgcttggagcggacctagagaggcccccgatagcctgtttgccgtgcggagacacctgtggggcagccacggcaactctaccttccccgagttcctgcacaacatggactacttcaagttccacaacatgaggccccccttcacctacgccaccctgatcagatgggccattctggaagcccccgagaagcagcggaccctgaacgagatctaccactggtttacccggatgttcgccttcttccggaaccaccccgccacctggaagaacgccatccggcacaatctgagcctgcacaagtgcttcgtgcgggtggaaagcgagaagggcgccgtgtggacagtggacgagctggaatttcggaagaagcggtcccagaggcccagccggtgtagcaatcctacacctggccctgagggcagaggaagtctgctaacatgcggtgacgtcgaggagaatcc

SEQ ID NO: 5 - protein, 5 aa, Artificial Sequence
  heavy chain variable region (VH) complementarity determining region (CDR) VH CDRs 1, CDR1
DYGMH

SEQ ID NO: 6 - protein, 17 aa, Artificial Sequence
  VH CDRs 1, CDR2
FIRNDGSDKYYADSVKG

SEQ ID NO: 7 - protein, 14 aa, Artificial Sequence
  VH CDRs 1, CDR3
NGESGPLDYWYFDL

SEQ ID NO: 8 - protein, 5 aa, Artificial Sequence
  VH CDRs 2, CDR1
DYGMH

SEQ ID NO: 9 - protein, 17 aa, Artificial Sequence
  VH CDRs 2, CDR2
FIRNDGSDKYYADSVKG

SEQ ID NO: 10 - protein, 14 aa, Artificial Sequence
  VH CDRs 2, CDR3
NGESGPLDYWYLDL

SEQ ID NO: 11 - protein, 5 aa, Artificial Sequence
  VH CDRs 3, CDR1
DYGMH

SEQ ID NO: 12 - protein, 17 aa, Artificial Sequence
  VH CDRs 3, CDR2
FIRNDGSDKYYADSVRG

SEQ ID NO: 13 - protein, 14 aa, Artificial Sequence
  VH CDRs 3, CDR3
NGESGPLDYWYFDL

SEQ ID NO: 14 - protein, 5 aa, Artificial Sequence
  VH CDRs 4, CDR1
DYGMH

SEQ ID NO: 15 - protein, 17 aa, Artificial Sequence
  VH CDRs 4, CDR2
FIRNDGSDKYYADSVKG

SEQ ID NO: 16 - protein, 14 aa, Artificial Sequence
  VH CDRs 4, CDR3
NGESGPLDYWYFDL

SEQ ID NO: 17 - protein, 11 aa, Artificial Sequence
  light chain variable region (VL) VL CDRs 1, CDR1
QASQDISNYLN

SEQ ID NO: 18 - protein, 7 aa, Artificial Sequence
  VL CDRs 1, CDR2
DASNLET

SEQ ID NO: 19 - protein, 9 aa, Artificial Sequence
  VL CDRs 1, CDR3
QQYDNLPPT

SEQ ID NO: 20 - protein, 11 aa, Artificial Sequence
  VL CDRs 2, CDR1
QSSLDISHYLN

SEQ ID NO: 21 - protein, 7 aa, Artificial Sequence
  VL CDRs 2, CDR2
DASNLET

SEQ ID NO: 22 - protein, 9 aa, Artificial Sequence
  VL CDRs 2, CDR3
QQYDNLPLT

SEQ ID NO: 23 - protein, 11 aa, Artificial Sequence
  VL CDRs 3, CDR1
RASHGINNYLA

SEQ ID NO: 24 - protein, 7 aa, Artificial Sequence
  VL CDRs 3, CDR2
AASTLQS

SEQ ID NO: 25 - protein, 9 aa, Artificial Sequence
  VL CDRs 3, CDR3
QQYDSYPPT

SEQ ID NO: 26 - protein, 11 aa, Artificial Sequence
  VL CDRs 4, CDR1
QASQDISNYLN

SEQ ID NO: 27 - protein, 7 aa, Artificial Sequence
  VL CDRs 4, CDR2
DASNLET

SEQ ID NO: 28 - protein, 9 aa, Artificial Sequence
  VL CDRs 4, CDR3
QQYSSFPLT

SEQ ID NO: 29 - protein, 11 aa, Artificial Sequence
  VL CDRs 5, CDR1
QASQDISNYLN

SEQ ID NO: 30 - protein, 7 aa, Artificial Sequence
  VL CDRs 5, CDR2
DETHLDS

SEQ ID NO: 31 - protein, 9 aa, Artificial Sequence
  VL CDRs 5, CDR3
QQYDSLPPT

SEQ ID NO: 32 - protein, 11 aa, Artificial Sequence
  VL CDRs 6, CDR1
QASQDISNYLN

SEQ ID NO: 33 - protein, 7 aa, Artificial Sequence
  VL CDRs 6, CDR2
DASNLET

SEQ ID NO: 34 - protein, 9 aa, Artificial Sequence
  VL CDRs 6, CDR3
QQYDNLPIT

SEQ ID NO: 35 - protein, 11 aa, Artificial Sequence
  VL CDRs 7, CDR1
QASQDISNYLN

SEQ ID NO: 36 - protein, 7 aa, Artificial Sequence
  VL CDRs 7, CDR2
DASNLET

SEQ ID NO: 37 - protein, 9 aa, Artificial Sequence
  VL CDRs 7, CDR3
QQYDNLPST

SEQ ID NO: 38 - protein, 11 aa, Artificial Sequence
  VL CDRs 8, CDR1
QASQDISNYLN

SEQ ID NO: 39 - protein, 7 aa, Artificial Sequence
  VL CDRs 8, CDR2
DASNLET

SEQ ID NO: 40 - protein, 9 aa, Artificial Sequence
  VL CDRs 8, CDR3
QQYNTYPLT

SEQ ID NO: 41 - protein, 11 aa, Artificial Sequence
  VL CDRs 9, CDR1
QASQDISNYLN

SEQ ID NO: 42 - protein, 7 aa, Artificial Sequence
  VL CDRs 9, CDR2
DASNLET

SEQ ID NO: 43 - protein, 9 aa, Artificial Sequence
  VL CDRs 9, CDR3
QQYHTYPLT

SEQ ID NO: 44 - protein, 11 aa, Artificial Sequence
  VL CDRs 10, CDR1
QASQDISNYLN

SEQ ID NO: 45 - protein, 7 aa, Artificial Sequence
  VL CDRs 10, CDR2
DASNLET

SEQ ID NO: 46 - protein, 9 aa, Artificial Sequence
  VL CDRs 10, CDR3
QQYDNLPLT

SEQ ID NO: 47 - protein, 11 aa, Artificial Sequence
  VL CDRs 11, CDR1
RTSQGISSALA

SEQ ID NO: 48 - protein, 7 aa, Artificial Sequence
  VL CDRs 11, CDR2
DASSLES

SEQ ID NO: 49 - protein, 9 aa, Artificial Sequence
  VL CDRs 11, CDR3
QQFNNYPLT

SEQ ID NO: 50 - protein, 11 aa, Artificial Sequence
  VL CDRs 12, CDR1
QASQDISNYLA

SEQ ID NO: 51 - protein, 7 aa, Artificial Sequence
  VL CDRs 12, CDR2
AASNLQS

SEQ ID NO: 52 - protein, 9 aa, Artificial Sequence
  VL CDRs 12, CDR3
LQDSSYPPT

SEQ ID NO: 53 - protein, 11 aa, Artificial Sequence
  VL CDRs 13, CDR1
RASQSISSWLA

SEQ ID NO: 54 - protein, 7 aa, Artificial Sequence
  VL CDRs 13, CDR2
KASNLQS

SEQ ID NO: 55 - protein, 9 aa, Artificial Sequence
  VL CDRs 13, CDR3
QQYSNYPLT

SEQ ID NO: 56 - protein, 11 aa, Artificial Sequence
  VL CDRs 14, CDR1
RASHGISNYFA

SEQ ID NO: 57 - protein, 7 aa, Artificial Sequence
  VL CDRs 14, CDR2
ATSTLQS

SEQ ID NO: 58 - protein, 9 aa, Artificial Sequence
  VL CDRs 14, CDR3
QQYSSYPLT

SEQ ID NO: 59 - protein, 11 aa, Artificial Sequence
  VL CDRs 15, CDR1
RASRGISNYLA

SEQ ID NO: 60 - protein, 7 aa, Artificial Sequence
  VL CDRs 15, CDR2
ATSTLQS

SEQ ID NO: 61 - protein, 9 aa, Artificial Sequence
  VL CDRs 15, CDR3
QQYDSYPPT

SEQ ID NO: 62 - protein, 5 aa, Artificial Sequence
  VH CDRs 5, CDR1
SYAIS

SEQ ID NO: 63 - protein, 17 aa, Artificial Sequence
  VH CDRs 5, CDR2
GIIPIFGTANYAQKFQG

SEQ ID NO: 64 - protein, 14 aa, Artificial Sequence
  VH CDRs 5, CDR3
GGYDSRGSYYYMDV

SEQ ID NO: 65 - protein, 5 aa, Artificial Sequence
  VH CDRs 6, CDR1
SYAMH

SEQ ID NO: 66 - protein, 17 aa, Artificial Sequence
  VH CDRs 6, CDR2
VISYDGSNKYYADSVKG

SEQ ID NO: 67 - protein, 14 aa, Artificial Sequence
  VH CDRs 6, CDR3
DREELLALFGGMDV

SEQ ID NO: 68 - protein, 5 aa, Artificial Sequence
  VH CDRs 7, CDR1
SYAIS

SEQ ID NO: 69 - protein, 17 aa, Artificial Sequence
  VH CDRs 7, CDR2
GIIPIFGTANYAQKFQG

SEQ ID NO: 70 - protein, 14 aa, Artificial Sequence
  VH CDRs 7, CDR3
PQSRWLQSGDAFDI

SEQ ID NO: 71 - protein, 5 aa, Artificial Sequence
  VH CDRs 8, CDR1
SYAMH

SEQ ID NO: 72 - protein, 17 aa, Artificial Sequence
  VH CDRs 8, CDR2
RINAGNGNTKYSQKFQG

SEQ ID NO: 73 - protein, 10 aa, Artificial Sequence
  VH CDRs 8, CDR3
DLTGTLLFDY

SEQ ID NO: 74 - protein, 5 aa, Artificial Sequence
  VH CDRs 9, CDR1
SYAIS

SEQ ID NO: 75 - protein, 17 aa, Artificial Sequence
  VH CDRs 9, CDR2
GIIPIFGTANYAQKFQG

SEQ ID NO: 76 - protein, 14 aa, Artificial Sequence
  VH CDRs 9, CDR3
RAERWLHLSGAFDI

SEQ ID NO: 77 - protein, 5 aa, Artificial Sequence
  VH CDRs 10, CDR1
SYAMS

SEQ ID NO: 78 - protein, 17 aa, Artificial Sequence
  VH CDRs 10, CDR2
AISGSGGSTYYADSVKG

SEQ ID NO: 79 - protein, 7 aa, Artificial Sequence
  VH CDRs 10, CDR3
GHYGDYV

SEQ ID NO: 80 - protein, 5 aa, Artificial Sequence
  VH CDRs 11, CDR1
SYAMH

SEQ ID NO: 81 - protein, 17 aa, Artificial Sequence
  VH CDRs 11, CDR2
WINAGNGNTKYSQKFQG

SEQ ID NO: 82 - protein, 9 aa, Artificial Sequence
  VH CDRs 11, CDR3
VSSGGAFDI

SEQ ID NO: 83 - protein, 5 aa, Artificial Sequence
  VH CDRs 12, CDR1
SYGFS

SEQ ID NO: 84 - protein, 17 aa, Artificial Sequence
  VH CDRs 12, CDR2
EIIPMFGTANYAQKLQG

SEQ ID NO: 85 - protein, 14 aa, Artificial Sequence
  VH CDRs 12, CDR3
VPRSSSGYNYGMDV

SEQ ID NO: 86 - protein, 7 aa, Artificial Sequence
  VH CDRs 13, CDR1
TNSGAWS

SEQ ID NO: 87 - protein, 18 aa, Artificial Sequence
  VH CDRs 13, CDR2
RTYYRSKWSTDYALSLQS

SEQ ID NO: 88 - protein, 10 aa, Artificial Sequence
  VH CDRs 13, CDR3
ENWNSGGFDY

SEQ ID NO: 89 - protein, 5 aa, Artificial Sequence
  VH CDRs 14, CDR1
SYAIS

SEQ ID NO: 90 - protein, 17 aa, Artificial Sequence
  VH CDRs 14, CDR2
GIIPIFGTANYAQKFQG

SEQ ID NO: 91 - protein, 13 aa, Artificial Sequence
  VH CDRs 14, CDR3
AASRWEPGDAFDI

SEQ ID NO: 92 - protein, 5 aa, Artificial Sequence
  VH CDRs 15, CDR1
SYDIS

SEQ ID NO: 93 - protein, 17 aa, Artificial Sequence
  VH CDRs 15, CDR2
WISAYNGNTNYAQKLQG

SEQ ID NO: 94 - protein, 13 aa, Artificial Sequence
  VH CDRs 15, CDR3
GGRWLRSASSFDY

SEQ ID NO: 95 - protein, 5 aa, Artificial Sequence
  VH CDRs 16, CDR1
DHYMS

SEQ ID NO: 96 - protein, 17 aa, Artificial Sequence
  VH CDRs 16, CDR2
WISAYNGNTNYAQKLQG

SEQ ID NO: 97 - protein, 14 aa, Artificial Sequence
  VH CDRs 16, CDR3
GLDSSAYQGRAFDI

SEQ ID NO: 98 - protein, 13 aa, Artificial Sequence
  VL CDRs 16, CDR1
SGSSSNIGGNAVN

SEQ ID NO: 99 - protein, 7 aa, Artificial Sequence
  VL CDRs 16, CDR2
SNNQRPS

SEQ ID NO: 100 - protein, 11 aa, Artificial Sequence
  VL CDRs 16, CDR3
TAWDDSLRGYL

SEQ ID NO: 101 - protein, 11 aa, Artificial Sequence
  VL CDRs 17, CDR1
GGNNIGSKSVH

SEQ ID NO: 102 - protein, 7 aa, Artificial Sequence
  VL CDRs 17, CDR2
DDSDRPS

SEQ ID NO: 103 - protein, 11 aa, Artificial Sequence
  VL CDRs 17, CDR3
HVWDAKTNHQV

SEQ ID NO: 104 - protein, 14 aa, Artificial Sequence
  VL CDRs 18, CDR1
TGTSSDVGGYNRVS

SEQ ID NO: 105 - protein, 7 aa, Artificial Sequence
  VL CDRs 18, CDR2
EVSNRPS

SEQ ID NO: 106 - protein, 10 aa, Artificial Sequence
  VL CDRs 18, CDR3
SSYTSSSTVV

SEQ ID NO: 107 - protein, 13 aa, Artificial Sequence
  VL CDRs 19, CDR1
SGSSSNIGSNGVK

SEQ ID NO: 108 - protein, 7 aa, Artificial Sequence
  VL CDRs 19, CDR2
RDYQRPS

SEQ ID NO: 109 - protein, 10 aa, Artificial Sequence
  VL CDRs 19, CDR3
AAWDDSLNVV

SEQ ID NO: 110 - protein, 13 aa, Artificial Sequence
  VL CDRs 20, CDR1
SGSSSNVGSNTVN

SEQ ID NO: 111 - protein, 7 aa, Artificial Sequence
  VL CDRs 20, CDR2
RDYQRPS

SEQ ID NO: 112 - protein, 11 aa, Artificial Sequence
  VL CDRs 20, CDR3
GAWDDSLNGYV

SEQ ID NO: 113 - protein, 13 aa, Artificial Sequence
  VL CDRs 21, CDR1
SGSSSNIGSNTVN

SEQ ID NO: 114 - protein, 7 aa, Artificial Sequence
  VL CDRs 21, CDR2
SNNQRPS

SEQ ID NO: 115 - protein, 11 aa, Artificial Sequence
  VL CDRs 21, CDR3
AAWDDSLNGPV

SEQ ID NO: 116 - protein, 14 aa, Artificial Sequence
  VL CDRs 22, CDR1
TGTGSDVGGYKYVS

SEQ ID NO: 117 - protein, 7 aa, Artificial Sequence
  VL CDRs 22, CDR2
DVNYWPS

SEQ ID NO: 118 - protein, 10 aa, Artificial Sequence
  VL CDRs 22, CDR3
SSYRTGDTWV

SEQ ID NO: 119 - protein, 11 aa, Artificial Sequence
  VL CDRs 23, CDR1
RASQGISNYLA

SEQ ID NO: 120 - protein, 7 aa, Artificial Sequence
  VL CDRs 23, CDR2
AASTLQS

SEQ ID NO: 121 - protein, 9 aa, Artificial Sequence
  VL CDRs 23, CDR3
QKYNSAPRT

SEQ ID NO: 122 - protein, 14 aa, Artificial Sequence
  VL CDRs 24, CDR1
TGTSSDVGGYNYVS

SEQ ID NO: 123 - protein, 7 aa, Artificial Sequence
  VL CDRs 24, CDR2
EVSKRPS

SEQ ID NO: 124 - protein, 10 aa, Artificial Sequence
  VL CDRs 24, CDR3
SSYAGSNNYV

SEQ ID NO: 125 - protein, 11 aa, Artificial Sequence
  VL CDRs 25, CDR1
GGDNIGGKSVH

SEQ ID NO: 126 - protein, 7 aa, Artificial Sequence
  VL CDRs 25, CDR2
HDTDRPS

SEQ ID NO: 127 - protein, 12 aa, Artificial Sequence
  VL CDRs 25, CDR3
AVWDASLGGSWL

SEQ ID NO: 128 - protein, 14 aa, Artificial Sequence
  VL CDRs 26, CDR1
TGSSSNIGAAYDVH

SEQ ID NO: 129 - protein, 7 aa, Artificial Sequence
  VL CDRs 26, CDR2
GDSNRPS

SEQ ID NO: 130 - protein, 12 aa, Artificial Sequence
  VL CDRs 26, CDR3
QSFDSSLSGSRV

SEQ ID NO: 131 - protein, 13 aa, Artificial Sequence
  VL CDRs 27, CDR1
SGSSSNIGSNPVH

SEQ ID NO: 132 - protein, 7 aa, Artificial Sequence
  VL CDRs 27, CDR2
RNNQRPS

SEQ ID NO: 133 - protein, 11 aa, Artificial Sequence
  VL CDRs 27, CDR3
AAWDVSLSGVV

SEQ ID NO: 134 - protein, 120 aa, Artificial Sequence
  variable heavy domain 1
VQLVQSGGGVVQPGGSLRVSCAASGVTLSDYGMHWVRQAPGKGLEWMAFIRNDGSDKYYADSVKGRFTISRDNSKKTVSLQMSSLRAEDTAVYYCAKNGESGPLDYWYFDLWGRGTLVTV

SEQ ID NO: 135 - protein, 117 aa, Artificial Sequence
  variable heavy domain 2
QVQLVQSGGGVVQPGGSLRVSCAASGVTLSDYGMHWVRQAPGKGLEWVAFIRNDGSDKYYADSVKGRFTISRDNSEKTVSLQMSSLRAEDTAVYYCAKNGESGPLDYWYLDLWGRGT

SEQ ID NO: 136 - protein, 117 aa, Artificial Sequence
  variable heavy domain 3
QVQLVQSGGGVVQPGGSMRVSCAASGVTLSDYGMHWVRQAPGKGLEWVAFIRNDGSDKYYADSVRGRFTISRDNSKKTVFLQMNSLRAEDTAVYYCAKNGESGPLDYWYFDLWGRGT

SEQ ID NO: 137 - protein, 117 aa, Artificial Sequence
  variable heavy domain 4
QVQLVQSGGGVVQPGGSLRVSCAASGVTLSDYGMHWVRQAPGKGLEWMAFIRNDGSDKYYADSVKGRFTISRDNSKKTVSLQMSSLRAEDTAVYYCAKNGESGPLDYWYFDLWGRGT

SEQ ID NO: 138 - protein, 123 aa, Artificial Sequence
  variable heavy domain 5
EVQLVQSGAEVKKPGSSVKVSCKASGGTFSSYAISWVRQAPGQGLEWMGGIIPIFGTANYAQKFQGRVTITADESTSTAYMELSSLRSEDTAVYYCARGGYDSRGSYYYMDVWGKGTTVTVSS

SEQ ID NO: 139 - protein, 123 aa, Artificial Sequence
  variable heavy domain 6
QVQLVESGGGVVQPGRSLRLSCAASGFTFSSYAMHWVRQAPGKGLEWVAVISYDGSNKYYADSVKGRFTISRDNSKNTLYLQMNSLRAEDTAVYYCARDREELLALFGGMDVWGQGTTVTVSS

SEQ ID NO: 140 - protein, 123 aa, Artificial Sequence
  variable heavy domain 7
EVQLVQSGAEVKKPGSSVKVSCKASGGTFSSYAISWVRQAPGQGLEWMGGIIPIFGTANYAQKFQGRVTITADKSTSTAYMELSSLRSEDTAVYYCARPQSRWLQSGDAFDIWGQGTMVTVSS

SEQ ID NO: 141 - protein, 119 aa, Artificial Sequence
  variable heavy domain 8
QVQLQQSGAEVKKPGASVKVSCKASGYTFTSYAMHWVRQAPGQRLEWMGRINAGNGNTKYSQKFQGRVTITRDTSASTAYMELSSLRSEDTAVYYCARDLTGTLLFDYWGQGTLVTVSS

SEQ ID NO: 142 - protein, 123 aa, Artificial Sequence
  variable heavy domain 9
QVQLVQSGAEVKKPGSSVKVSCKASGGTFSSYAISWVRQAPGQGLEWMGGIIPIFGTANYAQKFQGRATITADESTSTAYMELSSLRSEDTAVYYCARRAERWLHLSGAFDIWGQGTMVTVSS

SEQ ID NO: 143 - protein, 116 aa, Artificial Sequence
  variable heavy domain 10
QVQLVQSGGGLVQPGGSLRLSCAASGFTFSSYAMSWVRQAPGKGLEWVSAISGSGGSTYYADSVKGRFTMSRDNAKNSLYLQMNSLRVEDSAVYYCATGHYGDYVWGQGALVTVSS

SEQ ID NO: 144 - protein, 118 aa, Artificial Sequence
  variable heavy domain 11
QVQLQQSGAEVKKPGASVKVSCKASGYTFTSYAMHWVRQAPGQRLEWMGWINAGNGNTKYSQKFQGRVTITRDTSASTAYMELSSLRSEDTAVYYCARVSSGGAFDIWGQGTVVTVSS

SEQ ID NO: 145 - protein, 123 aa, Artificial Sequence
  variable heavy domain 12
QVQLVQSGAEVKKPGSSVKVSCKASGGTFSSYGFSWVRQAPGQGLEWMGEIIPMFGTANYAQKLQGRVTITAETSTSTVYMELSSLRSEDTATYYCARVPRSSSGYNYGMDVWGQGTTVTVSS

SEQ ID NO: 146 - protein, 122 aa, Artificial Sequence
  variable heavy domain 13
QVQLQQSGPGLLKPSQTLSLTCAVSGDSVSTNSGAWSWIRQSPSRGLEWLGRTYYRSKWSTDYALSLQSRVTIKSDRSKNQFSLQLDSVTPEDTAIYYCARENWNSGGFDYWGQGTLVTVPS

SEQ ID NO: 147 - protein, 122 aa, Artificial Sequence
  variable heavy domain 14
EVQLVESGAEVKKPGSSVKVSCKASGGTFSSYAISWVRQAPGQGLEWMGGIIPIFGTANYAQKFQGRVTITADKSTSTAYMELSSLRSEDTAVYYCARAASRWEPGDAFDIWGQGTMVTVSS

SEQ ID NO: 148 - protein, 122 aa, Artificial Sequence
  variable heavy domain 15
QVQLVQSGAEVKKPGASVKVSCKTSGYTFTSYDISWVRQAPGQGLEWMGWISAYNGNTNYAQKLQGRVTMTTDTSTSTAYMELRRLRSDDTAVYYCARGGRWLRSASSFDYWGQGTLVTVSS

SEQ ID NO: 149 - protein, 123 aa, Artificial Sequence
  variable heavy domain 16
EVQLVESGGGLVKPGGSLRLSCAASGFTFSDHYMSWVRQAPGKGLEWVSYITSGGSSIYYADSVKGRFTISRDNAKNSLYLQMNSLRAEDTAVYYCARGLDSSAYQGRAFDIWGQGTMVTVSS

SEQ ID NO: 150 - protein, 108 aa, Artificial Sequence
  variable light domain 1
DVVMTQSPSSLSASVGDRVTITCQASQDISNYLNWYQQKPGKAPKLLIYDASNLETGVPSRFSGSGSGTDFTFTISSLQPEDIATYYCQQYDNLPPTFGGGTKLTVLG

SEQ ID NO: 151 - protein, 107 aa, Artificial Sequence
  variable light domain 2
DVVMTQSPSSLSASVGDRVTITCQSSLDISHYLNWYQQKPGKAPKLLIYDASNLETGVPSRFSGSGSGTHFTFTISSLQPEDFATYYCQQYDNLPLTFGGGTKLEIK

SEQ ID NO: 152 - protein, 107 aa, Artificial Sequence
  variable light domain 3
DIVLMQSPSFLSASVGDRVTITCRASHGINNYLAWYQQKPGKAPKLLIYAASTLQSGVPSRFSGSGSGTEFTLTISSLQPEDFATYYCQQYDSYPPTFGRTKVEIKR

SEQ ID NO: 153 - protein, 107 aa, Artificial Sequence
  variable light domain 4
DVVMTQSPSSLSASVGDRVTITCQASQDISNYLNWYQQKPGKAPKLLIYDASNLETGVPSRFSGSGSGTDFTFTISSLQPEDFATYYCQQYSSFPLTFGGGTKVDIK

SEQ ID NO: 154 - protein, 107 aa, Artificial Sequence
  variable light domain 5
DVVMTQSPSSLSASVGDRVTITCQASQDISNYLNWYQQEPGKAPKLLIYDETHLDSGVPSRFTGSRSGTDFTLTISSLQPEDFATYYCQQYDSLPPTFGGGTKVDIK

SEQ ID NO: 155 - protein, 107 aa, Artificial Sequence
  variable light domain 6
DVVMTQSPSSLSASVGDRVTITCQASQDISNYLNWYQQKPGKAPKLLIYDASNLETGVPSRFSGSGSGTDFTFTISSLQPEDIATYYCQQYDNLPITFGGGTKVDIK

SEQ ID NO: 156 - protein, 107 aa, Artificial Sequence
  variable light domain 7
DVVMTQSPSSLSASVGDRVTITCQASQDISNYLNWYQQKPGKAPKLLIYDASNLETGVPSRFSGSGSGTDFTFTISSLQPEDIATYYCQQYDNLPSTFGGGTKVDIK

SEQ ID NO: 157 - protein, 107 aa, Artificial Sequence
  variable light domain 8
DVVMTQSPSSLSASVGDRVTITCQASQDISNYLNWYQQKPGKAPKLLIYDASNLETGVPSRFSGSGSGTDFTFTISSLQPEDFGTYYCQQYNTYPLTFGGGTKVDIK

SEQ ID NO: 158 - protein, 107 aa, Artificial Sequence
  variable light domain 9
DVVMTQSPSSLTASVGDRVTITCQASQDISNYLNWYQQKPGKAPKLLIYDASNLETGVPSRFSGSGSGTDFTLSIDSLQPEDFATYYCQQYHTYPLTFGGGTKVDIK

SEQ ID NO: 159 - protein, 107 aa, Artificial Sequence
  variable light domain 10
DVVMTQSPSSLSASVGDRVTITCQASQDISNYLNWYQQKPGKAPKLLIYDASNLETGVPSRFSGSGSGTDFTFTISSLQPEDIATYYCQQYDNLPLTFGGGTKVDIK

SEQ ID NO: 160 - protein, 107 aa, Artificial Sequence
  variable light domain 11
DVVMTQSPSSLSASVGDRVTITCRTSQGISSALAWYQQKPGKAPKLLIYDASSLESGVPSRFSGSGSGTDFTLTISSLQPEDFATYYCQQFNNYPLTFGGGTKVDIK

SEQ ID NO: 161 - protein, 107 aa, Artificial Sequence
  variable light domain 12
DVVMTQSPSSLSASVGDRVTITCQASQDISNYLAWYQQKPGRAPTLLIFAASNLQSGVPSRFSGSGSGTEFTLTISGLQPEDFATYYCLQDSSYPPTFGGGTKVDIK

SEQ ID NO: 162 - protein, 107 aa, Artificial Sequence
  variable light domain 13
DVVMTQSPSTLSASVGDRVTITCRASQSISSWLAWYQQKPGRAPTLLIYKASNLQSGVPSRFSGSGSGTEFTLTISSLQPDDFASYYCQQYSNYPLTFGGGTKVDIK

SEQ ID NO: 163 - protein, 107 aa, Artificial Sequence
  variable light domain 14
DVVMTQSPSFLSASVGDRVTITCRASHGISNYFAWYQQKPGKAPKLLIYATSTLQSGVPSRFSGSGSGTEFTLTISGLQPEDFATYYCQQYSSYPLTFGGGTKVDIK

SEQ ID NO: 164 - protein, 107 aa, Artificial Sequence
  variable light domain 15
DVVMTQSPSTLSAYVGDRITITCRASRGISNYLAWYQQKPGKAPKLLIYATSTLQSGVPLRFSGSGSGTEFTLTISGLQPEDFATYYCQQYDSYPPTFGGGTKVDIK

SEQ ID NO: 165 - protein, 110 aa, Artificial Sequence
  variable light domain 16
QSVLTQPPSTSGTPGQRVTISCSGSSSNIGGNAVNWYQHFPGTAPTLLIYSNNQRPSGVPERFSGSKSGTSASLTVSGLQAEDEADYYCTAWDDSLRGYLFGTGTKVTVL

SEQ ID NO: 166 - protein, 108 aa, Artificial Sequence
  variable light domain 17
QPVLTQPSSVSVAPGQTARITCGGNNIGSKSVHWYQQKPGQAPVLVVYDDSDRPSGIPERFSGSNSGNTATLTISRVEARDEADYYCHVWDAKTNHQVFGGGTRLTVQ

SEQ ID NO: 167 - protein, 110 aa, Artificial Sequence
  variable light domain 18
QPVLTQPRSVSGSPGQSVTISCTGTSSDVGGYNRVSWYQQTPGTAPKLMIYEVSNRPSGVSNRFSGSKSGNTASLTISGLQAEDEADYYCSSYTSSSTVVFGGGTKLTVL

SEQ ID NO: 168 - protein, 109 aa, Artificial Sequence
  variable light domain 19
QSVLTQPPSASGTPGQRVTISCSGSSSNIGSNGVKWYQQLPGTAPKLVIYRDYQRPSGVPDRFSGSKSGTSASLAISGLQSEDEAKYYCAAWDDSLNVVFGGGTQLTVL

SEQ ID NO: 169 - protein, 110 aa, Artificial Sequence
  variable light domain 20
QPVLTQSSSASGTPGQRVAISCSGSSSNVGSNTVNWYQQSPGTAPKLLISSNHQRPSGVPDRFSGSKFGTSASLAISGLQSEDEADYYCGAWDDSLNGYVFGSGTKVTVL

SEQ ID NO: 170 - protein, 110 aa, Artificial Sequence
  variable light domain 21
QAGLTQPPSASGTPGQRVTISCSGSSSNIGSNTVNWYQQLPGTAPKLLIYSNNQRPSGVPDRFSGSKSGTSASLAISGLQSEDEADYYCAAWDDSLNGPVFGGGTKLTVL

SEQ ID NO: 171 - protein, 110 aa, Artificial Sequence
  variable light domain 22
QSALTQPASVSGSPGQSITISCTGTGSDVGGYKYVSWYQHHPGKAPRLIIYDVNYWPSGVSHRFSGSKSGNTASLTISGLQSEDEADYYCSSYRTGDTWVFGGGTKLTVL

SEQ ID NO: 172 - protein, 107 aa, Artificial Sequence
  variable light domain 23
DIQMTQSPSSLSASVGDRVTITCRASQGISNYLAWYQQKPGKVPKLLIYAASTLQSGVPSRFSGSGSGTDFTLTISSLQPEDVATYYCQKYNSAPRTFGQGTKVEIK

SEQ ID NO: 173 - protein, 110 aa, Artificial Sequence
  variable light domain 24
QPVLTQSSSASGSPGQSVTISCTGTSSDVGGYNYVSWYQQHPGKAPKLMIYEVSKRPSGVPDRFSGSKSGSTASLTVSGLQAEDEAEYYCSSYAGSNNYVFGTGTKVTVL

SEQ ID NO: 174 - protein, 109 aa, Artificial Sequence
  variable light domain 25
QPVLTQSSSVSVAPGKTARVTCGGDNIGGKSVHWYQQRAGQAPVLVISHDTDRPSGIPERFSGSKSGTSASLAISGLRSEDEADYYCAVWDASLGGSWLFGGGTKLTVL

SEQ ID NO: 175 - protein, 111 aa, Artificial Sequence
  variable light domain 26
AGLTQPPSVSGAPGQRVTISCTGSSSNIGAAYDVHWYQQLPGAAPKLLIFGDSNRPSGVPDRFSGSKSDTSASLAITGLQAEDEADYYCQSFDSSLSGSRVFGGGTKLTVL

SEQ ID NO: 176 - protein, 110 aa, Artificial Sequence
  variable light domain 27
LPVLTQPPSASGTPGQRVTISCSGSSSNIGSNPVHWYQQLPGTAPKLLVYRNNQRPSGVPDRFSGSKSGTSASLAISGLRSEDEADYYCAAWDVSLSGVVFGGGTKLTVL

SEQ ID NO: 177 - protein, 222 aa, Artificial Sequence
  illustrative antigen binding domain 1
  MISC_FEATURE (115)..(115): Xaa is any known amino acid
QVQLVQSGGGVVQPGGSLRVSCAASGVTLSDYGMHWVRQAPGKGLEWVAFIRNDGSDKYYADSVKGRFTISRDNSEKTVSLQMSSLRAEDTAVYYCAKNGESGPLDYWYLDLWGXDVVMTQSPSSLSASVGDRVTITCQSSLDISHYLNWYQQKPGKAPKLLIYDASNLETGVPSRFSGSGSGTHFTFTISSLQPEDFATYYCQQYDNLPLTFGGGTKLEIK

SEQ ID NO: 178 - protein, 226 aa, Artificial Sequence
  illustrative antigen binding domain 2
  misc_feature (118)..(118): Xaa can be any naturally occurring amino acid
QVQLVQSGGGVVQPGGSLRVSCAASGVTLSDYGMHWVRQAPGKGLEWMAFIRNDGSDKYYADSVKGRFTISRDNSKKTVSLQMSSLRAEDTAVYYCAKNGESGPLDYWYFDLWGRGTXDVVMTQSPSSLSASVGDRVTITCQASQDISNYLNWYQQKPGKAPKLLIYDASNLETGVPSRFSGSGSGTDFTFTISSLQPEDIATYYCQQYDNLPPTFGGGTKLTVLG

SEQ ID NO: 179 - protein, 225 aa, Artificial Sequence
  illustrative antigen binding domain 3
  MISC_FEATURE (118)..(118): Xaa is any known amino acid
QVQLVQSGGGVVQPGGSMRVSCAASGVTLSDYGMHWVRQAPGKGLEWVAFIRNDGSDKYYADSVRGRFTISRDNSKKTVFLQMNSLRAEDTAVYYCAKNGESGPLDYWYFDLWGRGTXDIVLMQSPSFLSASVGDRVTITCRASHGINNYLAWYQQKPGKAPKLLIYAASTLQSGVPSRFSGSGSGTEFTLTISSLQPEDFATYYCQQYDSYPPTFGRTKVEIKR

SEQ ID NO: 180 - protein, 225 aa, Artificial Sequence
  illustrative antigen binding domain 4
  MISC_FEATURE (118)..(118): Xaa is any known amino acid
QVQLVQSGGGVVQPGGSLRVSCAASGVTLSDYGMHWVRQAPGKGLEWMAFIRNDGSDKYYADSVKGRFTISRDNSKKTVSLQMSSLRAEDTAVYYCAKNGESGPLDYWYFDLWGRGTXDVVMTQSPSSLSASVGDRVTITCQASQDISNYLNWYQQKPGKAPKLLIYDASNLETGVPSRFSGSGSGTDFTFTISSLQPEDFATYYCQQYSSFPLTFGGGTKVDIK

SEQ ID NO: 181 - protein, 225 aa, Artificial Sequence
  illustrative antigen binding domain 5
  MISC_FEATURE (118)..(118): Xaa is any known amino acid
QVQLVQSGGGVVQPGGSLRVSCAASGVTLSDYGMHWVRQAPGKGLEWMAFIRNDGSDKYYADSVKGRFTISRDNSKKTVSLQMSSLRAEDTAVYYCAKNGESGPLDYWYFDLWGRGTXDVVMTQSPSSLSASVGDRVTITCQASQDISNYLNWYQQEPGKAPKLLIYDETHLDSGVPSRFTGSRSGTDFTLTISSLQPEDFATYYCQQYDSLPPTFGGGTKVDIK

SEQ ID NO: 182 - protein, 225 aa, Artificial Sequence
  illustrative antigen binding domain 6
  MISC_FEATURE (118)..(118): Xaa is any known amino acid
QVQLVQSGGGVVQPGGSLRVSCAASGVTLSDYGMHWVRQAPGKGLEWMAFIRNDGSDKYYADSVKGRFTISRDNSKKTVSLQMSSLRAEDTAVYYCAKNGESGPLDYWYFDLWGRGTXDVVMTQSPSSLSASVGDRVTITCQASQDISNYLNWYQQKPGKAPKLLIYDASNLETGVPSRFSGSGSGTDFTFTISSLQPEDIATYYCQQYDNLPITFGGGTKVDIK

SEQ ID NO: 183 - protein, 225 aa, Artificial Sequence
  illustrative antigen binding domain 7
  MISC_FEATURE (118)..(118): Xaa is any known amino acid
QVQLVQSGGGVVQPGGSLRVSCAASGVTLSDYGMHWVRQAPGKGLEWMAFIRNDGSDKYYADSVKGRFTISRDNSKKTVSLQMSSLRAEDTAVYYCAKNGESGPLDYWYFDLWGRGTXDVVMTQSPSSLSASVGDRVTITCQASQDISNYLNWYQQKPGKAPKLLIYDASNLETGVPSRFSGSGSGTDFTFTISSLQPEDIATYYCQQYDNLPSTFGGGTKVDIK

SEQ ID NO: 184 - protein, 225 aa, Artificial Sequence
  illustrative antigen binding domain 8
  MISC_FEATURE (118)..(118): Xaa is any known amino acid
QVQLVQSGGGVVQPGGSLRVSCAASGVTLSDYGMHWVRQAPGKGLEWMAFIRNDGSDKYYADSVKGRFTISRDNSKKTVSLQMSSLRAEDTAVYYCAKNGESGPLDYWYFDLWGRGTXDVVMTQSPSSLSASVGDRVTITCQASQDISNYLNWYQQKPGKAPKLLIYDASNLETGVPSRFSGSGSGTDFTFTISSLQPEDFGTYYCQQYNTYPLTFGGGTKVDIK

SEQ ID NO: 185 - protein, 225 aa, Artificial Sequence
  illustrative antigen binding domain 9
  MISC_FEATURE (118)..(118): Xaa is any known amino acid
QVQLVQSGGGVVQPGGSLRVSCAASGVTLSDYGMHWVRQAPGKGLEWMAFIRNDGSDKYYADSVKGRFTISRDNSKKTVSLQMSSLRAEDTAVYYCAKNGESGPLDYWYFDLWGRGTXDVVMTQSPSSLTASVGDRVTITCQASQDISNYLNWYQQKPGKAPKLLIYDASNLETGVPSRFSGSGSGTDFTLSIDSLQPEDFATYYCQQYHTYPLTFGGGTKVDIK

SEQ ID NO: 186 - protein, 225 aa, Artificial Sequence
  illustrative antigen binding domain 10
  MISC_FEATURE (118)..(118): Xaa is any known amino acid
QVQLVQSGGGVVQPGGSLRVSCAASGVTLSDYGMHWVRQAPGKGLEWMAFIRNDGSDKYYADSVKGRFTISRDNSKKTVSLQMSSLRAEDTAVYYCAKNGESGPLDYWYFDLWGRGTXDVVMTQSPSSLSASVGDRVTITCQASQDISNYLNWYQQKPGKAPKLLIYDASNLETGVPSRFSGSGSGTDFTFTISSLQPEDIATYYCQQYDNLPLTFGGGTKVDIK

SEQ ID NO: 187 - protein, 225 aa, Artificial Sequence
  illustrative antigen binding domain 11
  MISC_FEATURE (118)..(118): Xaa is any known amino acid
QVQLVQSGGGVVQPGGSLRVSCAASGVTLSDYGMHWVRQAPGKGLEWMAFIRNDGSDKYYADSVKGRFTISRDNSKKTVSLQMSSLRAEDTAVYYCAKNGESGPLDYWYFDLWGRGTXDVVMTQSPSSLSASVGDRVTITCRTSQGISSALAWYQQKPGKAPKLLIYDASSLESGVPSRFSGSGSGTDFTLTISSLQPEDFATYYCQQFNNYPLTFGGGTKVDIK

SEQ ID NO: 188 - protein, 225 aa, Artificial Sequence
  illustrative antigen binding domain 12
  MISC_FEATURE (118)..(118): Xaa is any known amino acid
QVQLVQSGGGVVQPGGSLRVSCAASGVTLSDYGMHWVRQAPGKGLEWMAFIRNDGSDKYYADSVKGRFTISRDNSKKTVSLQMSSLRAEDTAVYYCAKNGESGPLDYWYFDLWGRGTXDVVMTQSPSSLSASVGDRVTITCQASQDISNYLAWYQQKPGRAPTLLIFAASNLQSGVPSRFSGSGSGTEFTLTISGLQPEDFATYYCLQDSSYPPTFGGGTKVDIK

SEQ ID NO: 189 - protein, 225 aa, Artificial Sequence
  illustrative antigen binding domain 13
  MISC_FEATURE (118)..(118): Xaa is any known amino acid
QVQLVQSGGGVVQPGGSLRVSCAASGVTLSDYGMHWVRQAPGKGLEWMAFIRNDGSDKYYADSVKGRFTISRDNSKKTVSLQMSSLRAEDTAVYYCAKNGESGPLDYWYFDLWGRGTXDVVMTQSPSTLSASVGDRVTITCRASQSISSWLAWYQQKPGRAPTLLIYKASNLQSGVPSRFSGSGSGTEFTLTISSLQPDDFASYYCQQYSNYPLTFGGGTKVDIK

SEQ ID NO: 190 - protein, 225 aa, Artificial Sequence
  illustrative antigen binding domain 14
  MISC_FEATURE (118)..(118): Xaa is any known amino acid
QVQLVQSGGGVVQPGGSLRVSCAASGVTLSDYGMHWVRQAPGKGLEWMAFIRNDGSDKYYADSVKGRFTISRDNSKKTVSLQMSSLRAEDTAVYYCAKNGESGPLDYWYFDLWGRGTXDVVMTQSPSFLSASVGDRVTITCRASHGISNYFAWYQQKPGKAPKLLIYATSTLQSGVPSRFSGSGSGTEFTLTISGLQPEDFATYYCQQYSSYPLTFGGGTKVDIK

SEQ ID NO: 191 - protein, 225 aa, Artificial Sequence
  illustrative antigen binding domain 15
  MISC_FEATURE (118)..(118): Xaa is any known amino acid
QVQLVQSGGGVVQPGGSLRVSCAASGVTLSDYGMHWVRQAPGKGLEWMAFIRNDGSDKYYADSVKGRFTISRDNSKKTVSLQMSSLRAEDTAVYYCAKNGESGPLDYWYFDLWGRGTXDVVMTQSPSTLSAYVGDRITITCRASRGISNYLAWYQQKPGKAPKLLIYATSTLQSGVPLRFSGSGSGTEFTLTISGLQPEDFATYYCQQYDSYPPTFGGGTKVDIK

SEQ ID NO: 192 - protein, 234 aa, Artificial Sequence
  illustrative antigen binding domain 16
  MISC_FEATURE (124)..(124): Xaa is any known amino acid
EVQLVQSGAEVKKPGSSVKVSCKASGGTFSSYAISWVRQAPGQGLEWMGGIIPIFGTANYAQKFQGRVTITADESTSTAYMELSSLRSEDTAVYYCARGGYDSRGSYYYMDVWGKGTTVTVSSXQSVLTQPPSTSGTPGQRVTISCSGSSSNIGGNAVNWYQHFPGTAPTLLIYSNNQRPSGVPERFSGSKSGTSASLTVSGLQAEDEADYYCTAWDDSLRGYLFGTGTKVTVL

SEQ ID NO: 193 - protein, 232 aa, Artificial Sequence
  illustrative antigen binding domain 17
  MISC_FEATURE (124)..(124): Xaa is any known amino acid
QVQLVESGGGVVQPGRSLRLSCAASGFTFSSYAMHWVRQAPGKGLEWVAVISYDGSNKYYADSVKGRFTISRDNSKNTLYLQMNSLRAEDTAVYYCARDREELLALFGGMDVWGQGTTVTVSSXQPVLTQPSSVSVAPGQTARITCGGNNIGSKSVHWYQQKPGQAPVLVVYDDSDRPSGIPERFSGSNSGNTATLTISRVEARDEADYYCHVWDAKTNHQVFGGGTRLTVQ

SEQ ID NO: 194 - protein, 234 aa, Artificial Sequence
  illustrative antigen binding domain 18
  MISC_FEATURE (124)..(124): Xaa is any known amino acid
EVQLVQSGAEVKKPGSSVKVSCKASGGTFSSYAISWVRQAPGQGLEWMGGIIPIFGTANYAQKFQGRVTITADKSTSTAYMELSSLRSEDTAVYYCARPQSRWLQSGDAFDIWGQGTMVTVSSXQPVLTQPRSVSGSPGQSVTISCTGTSSDVGGYNRVSWYQQTPGTAPKLMIYEVSNRPSGVSNRFSGSKSGNTASLTISGLQAEDEADYYCSSYTSSSTVVFGGGTKLTVL

SEQ ID NO: 195 - protein, 229 aa, Artificial Sequence
  illustrative antigen binding domain 19
  MISC_FEATURE (120)..(120): Xaa is any known amino acid
QVQLQQSGAEVKKPGASVKVSCKASGYTFTSYAMHWVRQAPGQRLEWMGRINAGNGNTKYSQKFQGRVTITRDTSASTAYMELSSLRSEDTAVYYCARDLTGTLLFDYWGQGTLVTVSSXQSVLTQPPSASGTPGQRVTISCSGSSSNIGSNGVKWYQQLPGTAPKLVIYRDYQRPSGVPDRFSGSKSGTSASLAISGLQSEDEAKYYCAAWDDSLNVVFGGGTQLTVL

SEQ ID NO: 196 - protein, 234 aa, Artificial Sequence
  illustrative antigen binding domain 20
  MISC_FEATURE (124)..(124): Xaa is any known amino acid
QVQLVQSGAEVKKPGSSVKVSCKASGGTFSSYAISWVRQAPGQGLEWMGGIIPIFGTANYAQKFQGRATITADESTSTAYMELSSLRSEDTAVYYCARRAERWLHLSGAFDIWGQGTMVTVSSXQPVLTQSSSASGTPGQRVAISCSGSSSNVGSNTVNWYQQSPGTAPKLLISSNHQRPSGVPDRFSGSKFGTSASLAISGLQSEDEADYYCGAWDDSLNGYVFGSGTKVTVL

SEQ ID NO: 197 - protein, 227 aa, Artificial Sequence
  illustrative antigen binding domain 21
  MISC_FEATURE (117)..(117): Xaa is any known amino acid
QVQLVQSGGGLVQPGGSLRLSCAASGFTFSSYAMSWVRQAPGKGLEWVSAISGSGGSTYYADSVKGRFTMSRDNAKNSLYLQMNSLRVEDSAVYYCATGHYGDYVWGQGALVTVSSXQAGLTQPPSASGTPGQRVTISCSGSSSNIGSNTVNWYQQLPGTAPKLLIYSNNQRPSGVPDRFSGSKSGTSASLAISGLQSEDEADYYCAAWDDSLNGPVFGGGTKLTVL

SEQ ID NO: 198 - protein, 229 aa, Artificial Sequence
  illustrative antigen binding domain 22
  MISC_FEATURE (119)..(119): Xaa is any known amino acid
QVQLQQSGAEVKKPGASVKVSCKASGYTFTSYAMHWVRQAPGQRLEWMGWINAGNGNTKYSQKFQGRVTITRDTSASTAYMELSSLRSEDTAVYYCARVSSGGAFDIWGQGTVVTVSSXQSALTQPASVSGSPGQSITISCTGTGSDVGGYKYVSWYQHHPGKAPRLIIYDVNYWPSGVSHRFSGSKSGNTASLTISGLQSEDEADYYCSSYRTGDTWVFGGGTKLTVL

SEQ ID NO: 199 - protein, 231 aa, Artificial Sequence
  illustrative antigen binding domain 23
  MISC_FEATURE (124)..(124): Xaa is any known amino acid
QVQLVQSGAEVKKPGSSVKVSCKASGGTFSSYGFSWVRQAPGQGLEWMGEIIPMFGTANYAQKLQGRVTITAETSTSTVYMELSSLRSEDTATYYCARVPRSSSGYNYGMDVWGQGTTVTVSSXDIQMTQSPSSLSASVGDRVTITCRASQGISNYLAWYQQKPGKVPKLLIYAASTLQSGVPSRFSGSGSGTDFTLTISSLQPEDVATYYCQKYNSAPRTFGQGTKVEIK

SEQ ID NO: 200 - protein, 233 aa, Artificial Sequence
  illustrative antigen binding domain 24
  MISC_FEATURE (123)..(123): Xaa is any known amino acid
QVQLQQSGPGLLKPSQTLSLTCAVSGDSVSTNSGAWSWIRQSPSRGLEWLGRTYYRSKWSTDYALSLQSRVTIKSDRSKNQFSLQLDSVTPEDTAIYYCARENWNSGGFDYWGQGTLVTVPSXQPVLTQSSSASGSPGQSVTISCTGTSSDVGGYNYVSWYQQHPGKAPKLMIYEVSKRPSGVPDRFSGSKSGSTASLTVSGLQAEDEAEYYCSSYAGSNNYVFGTGTKVTVL

SEQ ID NO: 201 - protein, 232 aa, Artificial Sequence
  illustrative antigen binding domain 25
  MISC_FEATURE (123)..(123): Xaa is any known amino acid
EVQLVESGAEVKKPGSSVKVSCKASGGTFSSYAISWVRQAPGQGLEWMGGIIPIFGTANYAQKFQGRVTITADKSTSTAYMELSSLRSEDTAVYYCARAASRWEPGDAFDIWGQGTMVTVSSXQPVLTQSSSVSVAPGKTARVTCGGDNIGGKSVHWYQQRAGQAPVLVISHDTDRPSGIPERFSGSKSGTSASLAISGLRSEDEADYYCAVWDASLGGSWLFGGGTKLTVL

SEQ ID NO: 202 - protein, 235 aa, Artificial Sequence
  illustrative antigen binding domain 26
  MISC_FEATURE (123)..(123): Xaa is any known amino acid
QVQLVQSGAEVKKPGASVKVSCKTSGYTFTSYDISWVRQAPGQGLEWMGWISAYNGNTNYAQKLQGRVTMTTDTSTSTAYMELRRLRSDDTAVYYCARGGRWLRSASSFDYWGQGTLVTVSSXQAGLTQPPSVSGAPGQRVTISCTGSSSNIGAAYDVHWYQQLPGAAPKLLIFGDSNRPSGVPDRFSGSKSDTSASLAITGLQAEDEADYYCQSFDSSLSGSRVFGGGTKLTVL

SEQ ID NO: 203 - protein, 234 aa, Artificial Sequence
  illustrative antigen binding domain 27
  MISC_FEATURE (124)..(124): Xaa is any known amino acid
EVQLVESGGGLVKPGGSLRLSCAASGFTFSDHYMSWVRQAPGKGLEWVSYITSGGSSIYYADSVKGRFTISRDNAKNSLYLQMNSLRAEDTAVYYCARGLDSSAYQGRAFDIWGQGTMVTVSSXLPVLTQPPSASGTPGQRVTISCSGSSSNIGSNPVHWYQQLPGTAPKLLVYRNNQRPSGVPDRFSGSKSGTSASLAISGLRSEDEADYYCAAWDVSLSGVVFGGGTKLTVL

SEQ ID NO: 204 - protein, 19 aa, Homo sapiens
LSRFSWGAEGQRPGFGYGG

SEQ ID NO: 205-208 - skipped (4 entries)

SEQ ID NO: 209 - protein, 219 aa, Artificial Sequence
  CAR construct: CD8 hinge-CD8 TM domain-CD28 signalling domain-CD3 zeta signalling domain
TTTPAPRPPTPAPTIASQPLSLRPEACRPAAGGAVHTRGLDFACDIYIWAPLAGTCGVLLLSLVITRSKRSRLLHSDYMNMTPRRPGPTRKHYQPYAPPRDFAAYRSRVKFSRSADAPAYQQGQNQLYNELNLGRREEYDVLDKRRGRDPEMGGKPRRKNPQEGLYNELQKDKMAEAYSEIGMKGERRRGKGHDGLYQGLSTATKDTYDALHMQALPPR

SEQ ID NO: 210 - protein, 213 aa, Artificial Sequence
  CAR construct: CD28 hinge-CD8 TM domain-CD28 signalling domain-CD3 zeta signalling domain
IEVMYPPPYLDNEKSNGTIIHVKGKHLCPSPLFPGPSKPIYIWAPLAGTCGVLLLSLVITRSKRSRLLHSDYMNMTPRRPGPTRKHYQPYAPPRDFAAYRSRVKFSRSADAPAYQQGQNQLYNELNLGRREEYDVLDKRRGRDPEMGGKPRRKNPQEGLYNELQKDKMAEAYSEIGMKGERRRGKGHDGLYQGLSTATKDTYDALHMQALPPR

SEQ ID NO: 211 - DNA, 657 bp, Artificial Sequence
  illustrative polynucleotide encoding SEQ ID NO: 209
accaccacccccgccccccgcccccccacccccgcccccaccatcgccagccagcccctgagcctgcgccccgaggcctgccgccccgccgccggcggcgccgtgcacacccgcggcctggacttcgcctgcgacatctacatctgggcccccctggccggcacctgcggcgtgctgctgctgagcctggtgatcacccgcagcaagcgcagccgcctgctgcacagcgactacatgaacatgaccccccgccgccccggccccacccgcaagcactaccagccctacgcccccccccgcgacttcgccgcctaccgcagccgcgtgaagttcagccgcagcgccgacgcccccgcctaccagcagggccagaaccagctgtacaacgagctgaacctgggccgccgcgaggagtacgacgtgctggacaagcgccgcggccgcgaccccgagatgggcggcaagccccgccgcaagaacccccaggagggcctgtacaacgagctgcagaaggacaagatggccgaggcctacagcgagatcggcatgaagggcgagcgccgccgcggcaagggccacgacggcctgtaccagggcctgagcaccgccaccaaggacacctacgacgccctgcacatgcaggccctgcccccccgc

SEQ ID NO: 212 - DNA, 639 bp, Artificial Sequence
  illustrative polynucleotide encoding SEQ ID NO: 210
atcgaggtgatgtacccccccccctacctggacaacgagaagagcaacggcaccatcatccacgtgaagggcaagcacctgtgccccagccccctgttccccggccccagcaagcccatctacatctgggcccccctggccggcacctgcggcgtgctgctgctgagcctggtgatcacccgcagcaagcgcagccgcctgctgcacagcgactacatgaacatgaccccccgccgccccggccccacccgcaagcactaccagccctacgcccccccccgcgacttcgccgcctaccgcagccgcgtgaagttcagccgcagcgccgacgcccccgcctaccagcagggccagaaccagctgtacaacgagctgaacctgggccgccgcgaggagtacgacgtgctggacaagcgccgcggccgcgaccccgagatgggcggcaagccccgccgcaagaacccccaggagggcctgtacaacgagctgcagaaggacaagatggccgaggcctacagcgagatcggcatgaagggcgagcgccgccgcggcaagggccacgacggcctgtaccagggcctgagcaccgccaccaaggacacctacgacgccctgcacatgcaggccctgcccccccgc

SEQ ID NO: 213 - protein, 22 aa, Artificial Sequence
  illustrative P2A peptide-cleavage domain
GSGATNFSLLKQAGDVEENPGP

SEQ ID NO: 214 - DNA, 66 bp, Artificial Sequence
  illustrative P2A peptide-cleavage domain
ggcagcggcgccaccaacttcagcctgctgaagcaggccggcgacgtggaggagaaccccggcccc

SEQ ID NO: 215 - protein, 21 aa, Artificial Sequence
  illustrative T2A peptide-cleavage domain
GSGEGRGSLLTCGDVEENPGP

SEQ ID NO: 216 - DNA, 63 bp, Artificial Sequence
  illustrative T2A peptide-cleavage domain
ggcagcggcgagggccgcggcagcctgctgacctgcggcgacgtggaggagaaccccggcccc

SEQ ID NO: 217 - protein, 23 aa, Artificial Sequence
  illustrative E2A peptide-cleavage domain
GSGQCTNYALLKLAGDVESNPGP

SEQ ID NO: 218 - DNA, 69 bp, Artificial Sequence
  illustrative E2A peptide-cleavage domain
ggcagcggccagtgcaccaactacgccctgctgaagctggccggcgacgtggagagcaaccccggcccc

SEQ ID NO: 219 - protein, 25 aa, Artificial Sequence
  illustrative F2A peptide-cleavage domain
GSGVKQTLNFDLLKLAGDVESNPGP

SEQ ID NO: 220 - DNA, 75 bp, Artificial Sequence
  illustrative F2A peptide-cleavage domain
ggcagcggcgtgaagcagaccctgaacttcgacctgctgaagctggccggcgacgtggagagcaaccccggcccc

SEQ ID NO: 221 - protein, 39 aa, Artificial Sequence
  illustrative CD28 hinge domain
IEVMYPPPYLDNEKSNGTIIHVKGKHLCPSPLFPGPSKP

SEQ ID NO: 222 - protein, 45 aa, Artificial Sequence
  illustrative CD8 hinge domain
TTTPAPRPPTPAPTIASQPLSLRPEACRPAAGGAVHTRGLDFACD

SEQ ID NO: 223 - protein, 10 aa, Artificial Sequence
  c-Myc tag sequence
EQKLISEEDL

SEQ ID NO: 224 - protein, 43 aa, Artificial Sequence
  illustrative CD28 hinge domain with an integrated c-Myc tag
IEVEQKLISEEDLLDNEKSNGTIIHVKGKHLCPSPLFPGPSKP

SEQ ID NO: 225 - protein, 21 aa, Artificial Sequence
  illustrative CD8 transmembrane domain
IYIWAPLAGTCGVLLLSLVIT

SEQ ID NO: 226 - protein, 66 aa, Artificial Sequence
  illustrative CD8 hinge domain and CD8 transmembrane domain
TTTPAPRPPTPAPTIASQPLSLRPEACRPAAGGAVHTRGLDFACDIYIWAPLAGTCGVLLLSLVIT

SEQ ID NO: 227 - protein, 60 aa, Artificial Sequence
  illustrative CD28 hinge domain and CD8 transmembrane domain
IEVMYPPPYLDNEKSNGTIIHVKGKHLCPSPLFPGPSKPIYIWAPLAGTCGVLLLSLVIT

SEQ ID NO: 228 - protein, 27 aa, Artificial Sequence
  illustrative CD28 transmembrane (TM) domain
FWVLVVVGGVLACYSLLVTVAFIIFWV

SEQ ID NO: 229 - protein, 112 aa, Artificial Sequence
  illustrative CD3 zeta signalling domain
RVKFSRSADAPAYQQGQNQLYNELNLGRREEYDVLDKRRGRDPEMGGKPRRKNPQEGLYNELQKDKMAEAYSEIGMKGERRRGKGHDGLYQGLSTATKDTYDALHMQALPPR

SEQ ID NO: 230 - protein, 41 aa, Artificial Sequence
  illustrative CD28 signalling domain
RSKRSRLLHSDYMNMTPRRPGPTRKHYQPYAPPRDFAAYRS

SEQ ID NO: 231 - protein, 48 aa, Artificial Sequence
  illustrative CD27 signalling domain
QRRKYRSNKGESPVEPAEPCHYSCPREEEGSTIPIQEDYRKPEPACSP

SEQ ID NO: 232 - protein, 42 aa, Artificial Sequence
  illustrative OX40 signalling domain
ALYLLRRDQRLPPDAHKPPGGGSFRTPIQEEQADAHSTLAKI

SEQ ID NO: 233 - protein, 42 aa, Artificial Sequence
  illustrative 41BB signalling domain
KRGRKKLLYIFKQPFMRPVQTTQEEDGCSCRFPEEEEGGCEL

SEQ ID NO: 234 - protein, 38 aa, Artificial Sequence
  illustrative ICOS signalling domain
CWLTKKKYSSSVHDPNGEYMFMRAVNTAKKSRLTDVTL

SEQ ID NO: 235 - protein, 197 aa, Artificial Sequence
  illustrative TNFRSF25 signalling domain
TYTYRHCWPHKPLVTADEAGMEALTPPPATHLSPLDSAHTLLAPPDSSEKICTVQLVGNSWTPGYPETQEALCPQVTWSWDQLPSRALGPAAAPTLSPESPAGSPAMMLQPGPQLYDVMDAVPARRWKEFVRTLGLREAEIEAVEVEIGRFRDQQYEMLKRWRQQQPAGLGAVYAALERMGLDGCVEDLRSRLQRGP

SEQ ID NO: 236 - protein, 153 aa, Artificial Sequence
  illustrative CD28 signalling domain and CD3 zeta signalling domain
RSKRSRLLHSDYMNMTPRRPGPTRKHYQPYAPPRDFAAYRSRVKFSRSADAPAYQQGQNQLYNELNLGRREEYDVLDKRRGRDPEMGGKPRRKNPQEGLYNELQKDKMAEAYSEIGMKGERRRGKGHDGLYQGLSTATKDTYDALHMQALPPR

SEQ ID NO: 237 - protein, 21 aa, Artificial Sequence
  illustrative CD8 leader sequence
MALPVTALLLPLALLLHAARP

SEQ ID NO: 238 - protein, 4 aa, Artificial Sequence
  Furin site - cleavage domain
  misc_feature (2)..(3): Xaa can be any naturally occurring amino acid
RXXR

SEQ ID NO: 239 - protein, 4 aa, Artificial Sequence
  Furin site - cleavage domain
RRKR

SEQ ID NO: 240 - protein, 9 aa, Artificial Sequence
  highly conserved sequence shared by different 2As at the C-terminus
  misc_feature (5)..(5): Xaa can be any naturally occurring amino acid
GDVEXNPGP

SEQ ID NO: 241 - protein, 21 aa, Artificial Sequence
  illustrative leader sequence
MALPVTALLLPLALLLHAAAP

SEQ ID NO: 242 - protein, 19 aa, Artificial Sequence
  illustrative P2A peptide-cleavage domain
ATNFSLLKQAGDVEENPGP

SEQ ID NO: 243 - DNA, 57 bp, Artificial Sequence
  illustrative P2A peptide-cleavage domain
gccaccaacttcagcctgctgaagcaggccggcgacgtggaggagaaccccggcccc

SEQ ID NO: 244 - protein, 18 aa, Artificial Sequence
  illustrative T2A peptide-cleavage domain
EGRGSLLTCGDVEENPGP

SEQ ID NO: 245 - DNA, 54 bp, Artificial Sequence
  illustrative T2A peptide-cleavage domain
gagggccgcggcagcctgctgacctgcggcgacgtggaggagaaccccggcccc

SEQ ID NO: 246 - protein, 20 aa, Artificial Sequence
  illustrative E2A peptide-cleavage domain
QCTNYALLKLAGDVESNPGP

SEQ ID NO: 247 - DNA, 60 bp, Artificial Sequence
  illustrative E2A peptide-cleavage domain
cagtgcaccaactacgccctgctgaagctggccggcgacgtggagagcaaccccggcccc

SEQ ID NO: 248 - protein, 22 aa, Artificial Sequence
  illustrative F2A peptide-cleavage domain
VKQTLNFDLLKLAGDVESNPGP

SEQ ID NO: 249 - DNA, 66 bp, Artificial Sequence
  illustrative F2A peptide-cleavage domain
gtgaagcagaccctgaacttcgacctgctgaagctggccggcgacgtggagagcaaccccggcccc

SEQ ID NO: 250 - DNA, 589 bp, Woodchuck hepatitis virus
aatcaacctctggattacaaaatttgtgaaagattgactggtattcttaactatgttgctccttttacgctatgtggatacgctgctttaatgcctttgtatcatgctattgcttcccgtatggctttcattttctcctccttgtataaatcctggttgctgtctctttatgaggagttgtggcccgttgtcaggcaacgtggcgtggtgtgcactgtgtttgctgacgcaacccccactggttggggcattgccaccacctgtcagctcctttccgggactttcgctttccccctccctattgccacggcggaactcatcgccgcctgccttgcccgctgctggacaggggctcggctgttgggcactgacaattccgtggtgttgtcggggaaatcatcgtcctttccttggctgctcgcctatgttgccacctggattctgcgcgggacgtccttctgctacgtcccttcggccctcaatccagcggaccttccttcccgcggcctgctgccggctctgcggcctcttccgcgtcttcgccttcgccctcagacgagtcggatctccctttgggccgcctccccgc

SEQ ID NO: 251 - protein, 221 aa, Artificial Sequence
  illustrative antigen binding domain 1
  Relationship to another sequence: Variation of SEQ ID NO: 177
QVQLVQSGGGVVQPGGSLRVSCAASGVTLSDYGMHWVRQAPGKGLEWVAFIRNDGSDKYYADSVKGRFTISRDNSEKTVSLQMSSLRAEDTAVYYCAKNGESGPLDYWYLDLWGDVVMTQSPSSLSASVGDRVTITCQSSLDISHYLNWYQQKPGKAPKLLIYDASNLETGVPSRFSGSGSGTHFTFTISSLQPEDFATYYCQQYDNLPLTFGGGTKLEIK

SEQ ID NO: 252 - protein, 221 aa, Artificial Sequence; identical to SEQ ID NO: 251
  illustrative antigen binding domain 1
  Relationship to another sequence: Variation of SEQ ID NO: 177

SEQ ID NO: 253 - protein, 221 aa, Artificial Sequence; identical to SEQ ID NO: 251
  illustrative antigen binding domain 1
  Relationship to another sequence: Variation of SEQ ID NO: 177

SEQ ID NO: 254 - protein, 221 aa, Artificial Sequence; identical to SEQ ID NO: 251
  illustrative antigen binding domain 1
  Relationship to another sequence: Variation of SEQ ID NO: 177

SEQ ID NO: 255 - protein, 221 aa, Artificial Sequence; identical to SEQ ID NO: 251
  illustrative antigen binding domain 1
  Relationship to another sequence: Variation of SEQ ID NO: 177

SEQ ID NO: 256 - protein, 221 aa, Artificial Sequence; identical to SEQ ID NO: 251
  illustrative antigen binding domain 1
  Relationship to another sequence: Variation of SEQ ID NO: 177

SEQ ID NO: 257 - protein, 221 aa, Artificial Sequence; identical to SEQ ID NO: 251
  illustrative antigen binding domain 1
  Relationship to another sequence: Variation of SEQ ID NO: 177

SEQ ID NO: 258 - protein, 221 aa, Artificial Sequence; identical to SEQ ID NO: 251
  illustrative antigen binding domain 1
  Relationship to another sequence: Variation of SEQ ID NO: 177

SEQ ID NO: 259 - protein, 221 aa, Artificial Sequence; identical to SEQ ID NO: 251
  illustrative antigen binding domain 1
  Relationship to another sequence: Variation of SEQ ID NO: 177

SEQ ID NO: 260 - protein, 221 aa, Artificial Sequence; identical to SEQ ID NO: 251
  illustrative antigen binding domain 1
  Relationship to another sequence: Variation of SEQ ID NO: 177

SEQ ID NO: 261 - protein, 221 aa, Artificial Sequence; identical to SEQ ID NO: 251
  illustrative antigen binding domain 1
  Relationship to another sequence: Variation of SEQ ID NO: 177

SEQ ID NO: 262 - protein, 221 aa, Artificial Sequence; identical to SEQ ID NO: 251
  illustrative antigen binding domain 1
  Relationship to another sequence: Variation of SEQ ID NO: 177

SEQ ID NO: 263 - protein, 221 aa, Artificial Sequence; identical to SEQ ID NO: 251
  illustrative antigen binding domain 1
  Relationship to another sequence: Variation of SEQ ID NO: 177

SEQ ID NO: 264 - protein, 221 aa, Artificial Sequence; identical to SEQ ID NO: 251
  illustrative antigen binding domain 1
  Relationship to another sequence: Variation of SEQ ID NO: 177

SEQ ID NO: 265 - protein, 221 aa, Artificial Sequence; identical to SEQ ID NO: 251
  illustrative antigen binding domain 1
  Relationship to another sequence: Variation of SEQ ID NO: 177

SEQ ID NO: 266 - protein, 221 aa, Artificial Sequence; identical to SEQ ID NO: 251
  illustrative antigen binding domain 1
  Relationship to another sequence: Variation of SEQ ID NO: 177

SEQ ID NO: 267 - protein, 221 aa, Artificial Sequence; identical to SEQ ID NO: 251
  illustrative antigen binding domain 1
  Relationship to another sequence: Variation of SEQ ID NO: 177

SEQ ID NO: 268 - protein, 221 aa, Artificial Sequence; identical to SEQ ID NO: 251
  illustrative antigen binding domain 1
  Relationship to another sequence: Variation of SEQ ID NO: 177

SEQ ID NO: 269 - protein, 221 aa, Artificial Sequence; identical to SEQ ID NO: 251
  illustrative antigen binding domain 1
  Relationship to another sequence: Variation of SEQ ID NO: 177

SEQ ID NO: 270 - protein, 221 aa, Artificial Sequence; identical to SEQ ID NO: 251
  illustrative antigen binding domain 1
  Relationship to another sequence: Variation of SEQ ID NO: 177

SEQ ID NO: 271 - protein, 221 aa, Artificial Sequence; identical to SEQ ID NO: 251
  illustrative antigen binding domain 1
  Relationship to another sequence: Variation of SEQ ID NO: 177

SEQ ID NO: 272 - protein, 221 aa, Artificial Sequence; identical to SEQ ID NO: 251
  illustrative antigen binding domain 1
  Relationship to another sequence: Variation of SEQ ID NO: 177

SEQ ID NO: 273 - protein, 221 aa, Artificial Sequence; identical to SEQ ID NO: 251
  illustrative antigen binding domain 1
  Relationship to another sequence: Variation of SEQ ID NO: 177

SEQ ID NO: 274 - protein, 221 aa, Artificial Sequence; identical to SEQ ID NO: 251
  illustrative antigen binding domain 1
  Relationship to another sequence: Variation of SEQ ID NO: 177

SEQ ID NO: 275 - protein, 221 aa, Artificial Sequence; identical to SEQ ID NO: 251
  illustrative antigen binding domain 1
  Relationship to another sequence: Variation of SEQ ID NO: 177

SEQ ID NO: 276 - protein, 221 aa, Artificial Sequence; identical to SEQ ID NO: 251
  illustrative antigen binding domain 1
  Relationship to another sequence: Variation of SEQ ID NO: 177

SEQ ID NO: 277 - protein, 221 aa, Artificial Sequence; identical to SEQ ID NO: 251
  illustrative antigen binding domain 1
  Relationship to another sequence: Variation of SEQ ID NO: 177

SEQ ID NO: 278 - protein, 221 aa, Artificial Sequence; identical to SEQ ID NO: 251
  illustrative antigen binding domain 1
  Relationship to another sequence: Variation of SEQ ID NO: 177

SEQ ID NO: 279 - protein, 221 aa, Artificial Sequence; identical to SEQ ID NO: 251
  illustrative antigen binding domain 1
  Relationship to another sequence: Variation of SEQ ID NO: 177

SEQ ID NO: 280 - protein, 224 aa, Artificial Sequence
  illustrative antigen binding domain 3
  Relationship to another sequence: Variation of SEQ ID NO: 179
QVQLVQSGGGVVQPGGSMRVSCAASGVTLSDYGMHWVRQAPGKGLEWVAFIRNDGSDKYYADSVRGRFTISRDNSKKTVFLQMNSLRAEDTAVYYCAKNGESGPLDYWYFDLWGRGTDIVLMQSPSFLSASVGDRVTITCRASHGINNYLAWYQQKPGKAPKLLIYAASTLQSGVPSRFSGSGSGTEFTLTISSLQPEDFATYYCQQYDSYPPTFGRTKVEIKR

SEQ ID NO: 281 - protein, 224 aa, Artificial Sequence; identical to SEQ ID NO: 280
  illustrative antigen binding domain 3
  Relationship to another sequence: Variation of SEQ ID NO: 179

SEQ ID NO: 282 - protein, 224 aa, Artificial Sequence; identical to SEQ ID NO: 280
  illustrative antigen binding domain 3
  Relationship to another sequence: Variation of SEQ ID NO: 179

SEQ ID NO: 283 - protein, 224 aa, Artificial Sequence; identical to SEQ ID NO: 280
  illustrative antigen binding domain 3
  Relationship to another sequence: Variation of SEQ ID NO: 179

SEQ ID NO: 284 - protein, 224 aa, Artificial Sequence; identical to SEQ ID NO: 280
  illustrative antigen binding domain 3
  Relationship to another sequence: Variation of SEQ ID NO: 179

SEQ ID NO: 285 - protein, 224 aa, Artificial Sequence; identical to SEQ ID NO: 280
  illustrative antigen binding domain 3
  Relationship to another sequence: Variation of SEQ ID NO: 179

SEQ ID NO: 286 - protein, 224 aa, Artificial Sequence; identical to SEQ ID NO: 280
  illustrative antigen binding domain 3
  Relationship to another sequence: Variation of SEQ ID NO: 179

SEQ ID NO: 287 - protein, 224 aa, Artificial Sequence; identical to SEQ ID NO: 280
  illustrative antigen binding domain 3
  Relationship to another sequence: Variation of SEQ ID NO: 179

SEQ ID NO: 288 - protein, 224 aa, Artificial Sequence; identical to SEQ ID NO: 280
  illustrative antigen binding domain 3
  Relationship to another sequence: Variation of SEQ ID NO: 179

SEQ ID NO: 289 - protein, 224 aa, Artificial Sequence; identical to SEQ ID NO: 280
  illustrative antigen binding domain 3
  Relationship to another sequence: Variation of SEQ ID NO: 179

SEQ ID NO: 290 - protein, 224 aa, Artificial Sequence; identical to SEQ ID NO: 280
  illustrative antigen binding domain 3
  Relationship to another sequence: Variation of SEQ ID NO: 179

SEQ ID NO: 291 - protein, 224 aa, Artificial Sequence; identical to SEQ ID NO: 280
  illustrative antigen binding domain 3
  Relationship to another sequence: Variation of SEQ ID NO: 179

SEQ ID NO: 292 - protein, 224 aa, Artificial Sequence; identical to SEQ ID NO: 280
  illustrative antigen binding domain 3
  Relationship to another sequence: Variation of SEQ ID NO: 179

SEQ ID NO: 293 - protein, 224 aa, Artificial Sequence; identical to SEQ ID NO: 280
  illustrative antigen binding domain 3
  Relationship to another sequence: Variation of SEQ ID NO: 179

SEQ ID NO: 294 - protein, 224 aa, Artificial Sequence; identical to SEQ ID NO: 280
  illustrative antigen binding domain 3
  Relationship to another sequence: Variation of SEQ ID NO: 179

SEQ ID NO: 295 - protein, 224 aa, Artificial Sequence; identical to SEQ ID NO: 280
  illustrative antigen binding domain 3
  Relationship to another sequence: Variation of SEQ ID NO: 179

SEQ ID NO: 296 - protein, 224 aa, Artificial Sequence; identical to SEQ ID NO: 280
  illustrative antigen binding domain 3
  Relationship to another sequence: Variation of SEQ ID NO: 179

SEQ ID NO: 297 - protein, 224 aa, Artificial Sequence; identical to SEQ ID NO: 280
  illustrative antigen binding domain 3
  Relationship to another sequence: Variation of SEQ ID NO: 179

SEQ ID NO: 298 - protein, 224 aa, Artificial Sequence; identical to SEQ ID NO: 280
  illustrative antigen binding domain 3
  Relationship to another sequence: Variation of SEQ ID NO: 179

SEQ ID NO: 299 - protein, 224 aa, Artificial Sequence; identical to SEQ ID NO: 280
  illustrative antigen binding domain 3
  Relationship to another sequence: Variation of SEQ ID NO: 179

SEQ ID NO: 300 - protein, 224 aa, Artificial Sequence; identical to SEQ ID NO: 280
  illustrative antigen binding domain 3
  Relationship to another sequence: Variation of SEQ ID NO: 179

SEQ ID NO: 301 - protein, 224 aa, Artificial Sequence; identical to SEQ ID NO: 280
  illustrative antigen binding domain 3
  Relationship to another sequence: Variation of SEQ ID NO: 179

SEQ ID NO: 302 - protein, 224 aa, Artificial Sequence; identical to SEQ ID NO: 280
  illustrative antigen binding domain 3
  Relationship to another sequence: Variation of SEQ ID NO: 179

SEQ ID NO: 303 - protein, 224 aa, Artificial Sequence; identical to SEQ ID NO: 280
  illustrative antigen binding domain 3
  Relationship to another sequence: Variation of SEQ ID NO: 179

SEQ ID NO: 304 - protein, 224 aa, Artificial Sequence; identical to SEQ ID NO: 280
  illustrative antigen binding domain 3
  Relationship to another sequence: Variation of SEQ ID NO: 179

SEQ ID NO: 305 - protein, 224 aa, Artificial Sequence; identical to SEQ ID NO: 280
  illustrative antigen binding domain 3
  Relationship to another sequence: Variation of SEQ ID NO: 179

SEQ ID NO: 306 - protein, 224 aa, Artificial Sequence; identical to SEQ ID NO: 280
  illustrative antigen binding domain 3
  Relationship to another sequence: Variation of SEQ ID NO: 179

SEQ ID NO: 307 - protein, 224 aa, Artificial Sequence; identical to SEQ ID NO: 280
  illustrative antigen binding domain 3
  Relationship to another sequence: Variation of SEQ ID NO: 179

SEQ ID NO: 308 - protein, 224 aa, Artificial Sequence; identical to SEQ ID NO: 280
  illustrative antigen binding domain 3
  Relationship to another sequence: Variation of SEQ ID NO: 179

SEQ ID NO: 309 - protein, 224 aa, Artificial Sequence
  illustrative antigen binding domain 4
  Relationship to another sequence: Variation of SEQ ID NO: 180
QVQLVQSGGGVVQPGGSLRVSCAASGVTLSDYGMHWVRQAPGKGLEWMAFIRNDGSDKYYADSVKGRFTISRDNSKKTVSLQMSSLRAEDTAVYYCAKNGESGPLDYWYFDLWGRGTDVVMTQSPSSLSASVGDRVTITCQASQDISNYLNWYQQKPGKAPKLLIYDASNLETGVPSRFSGSGSGTDFTFTISSLQPEDFATYYCQQYSSFPLTFGGGTKVDIK

SEQ ID NO: 310 - protein, 224 aa, Artificial Sequence; identical to SEQ ID NO: 309
  illustrative antigen binding domain 4
  Relationship to another sequence: Variation of SEQ ID NO: 180

SEQ ID NO: 311 - protein, 224 aa, Artificial Sequence; identical to SEQ ID NO: 309
  illustrative antigen binding domain 4
  Relationship to another sequence: Variation of SEQ ID NO: 180

SEQ ID NO: 312 - protein, 224 aa, Artificial Sequence; identical to SEQ ID NO: 309
  illustrative antigen binding domain 4
  Relationship to another sequence: Variation of SEQ ID NO: 180

SEQ ID NO: 313 - protein, 224 aa, Artificial Sequence; identical to SEQ ID NO: 309
  illustrative antigen binding domain 4
  Relationship to another sequence: Variation of SEQ ID NO: 180

SEQ ID NO: 314 - protein, 224 aa, Artificial Sequence; identical to SEQ ID NO: 309
  illustrative antigen binding domain 4
  Relationship to another sequence: Variation of SEQ ID NO: 180

SEQ ID NO: 315 - protein, 224 aa, Artificial Sequence; identical to SEQ ID NO: 309
  illustrative antigen binding domain 4
  Relationship to another sequence: Variation of SEQ ID NO: 180

SEQ ID NO: 316 - protein, 224 aa, Artificial Sequence; identical to SEQ ID NO: 309
  illustrative antigen binding domain 4
  Relationship to another sequence: Variation of SEQ ID NO: 180

SEQ ID NO: 317 - protein, 224 aa, Artificial Sequence; identical to SEQ ID NO: 309
  illustrative antigen binding domain 4
  Relationship to another sequence: Variation of SEQ ID NO: 180

SEQ ID NO: 318 - protein, 224 aa, Artificial Sequence; identical to SEQ ID NO: 309
  illustrative antigen binding domain 4
  Relationship to another sequence: Variation of SEQ ID NO: 180

SEQ ID NO: 319 - protein, 224 aa, Artificial Sequence; identical to SEQ ID NO: 309
  illustrative antigen binding domain 4
  Relationship to another sequence: Variation of SEQ ID NO: 180

SEQ ID NO: 320 - protein, 224 aa, Artificial Sequence; identical to SEQ ID NO: 309
  illustrative antigen binding domain 4
  Relationship to another sequence: Variation of SEQ ID NO: 180

SEQ ID NO: 321 - protein, 224 aa, Artificial Sequence; identical to SEQ ID NO: 309
  illustrative antigen binding domain 4
  Relationship to another sequence: Variation of SEQ ID NO: 180

SEQ ID NO: 322 - protein, 224 aa, Artificial Sequence; identical to SEQ ID NO: 309
  illustrative antigen binding domain 4
  Relationship to another sequence: Variation of SEQ ID NO: 180

SEQ ID NO: 323 - protein, 224 aa, Artificial Sequence; identical to SEQ ID NO: 309
  illustrative antigen binding domain 4
  Relationship to another sequence: Variation of SEQ ID NO: 180

SEQ ID NO: 324 - protein, 224 aa, Artificial Sequence; identical to SEQ ID NO: 309
  illustrative antigen binding domain 4
  Relationship to another sequence: Variation of SEQ ID NO: 180

SEQ ID NO: 325 - protein, 224 aa, Artificial Sequence; identical to SEQ ID NO: 309
  illustrative antigen binding domain 4
  Relationship to another sequence: Variation of SEQ ID NO: 180

SEQ ID NO: 326 - protein, 224 aa, Artificial Sequence; identical to SEQ ID NO: 309
  illustrative antigen binding domain 4
  Relationship to another sequence: Variation of SEQ ID NO: 180

SEQ ID NO: 327 - protein, 224 aa, Artificial Sequence; identical to SEQ ID NO: 309
  illustrative antigen binding domain 4
  Relationship to another sequence: Variation of SEQ ID NO: 180

SEQ ID NO: 328 - protein, 224 aa, Artificial Sequence; identical to SEQ ID NO: 309
  illustrative antigen binding domain 4
  Relationship to another sequence: Variation of SEQ ID NO: 180

SEQ ID NO: 329 - protein, 224 aa, Artificial Sequence; identical to SEQ ID NO: 309
  illustrative antigen binding domain 4
  Relationship to another sequence: Variation of SEQ ID NO: 180

SEQ ID NO: 330 - protein, 224 aa, Artificial Sequence; identical to SEQ ID NO: 309
  illustrative antigen binding domain 4
  Relationship to another sequence: Variation of SEQ ID NO: 180

SEQ ID NO: 331 - protein, 224 aa, Artificial Sequence; identical to SEQ ID NO: 309
  illustrative antigen binding domain 4
  Relationship to another sequence: Variation of SEQ ID NO: 180

SEQ ID NO: 332 - protein, 224 aa, Artificial Sequence; identical to SEQ ID NO: 309
  illustrative antigen binding domain 4
  Relationship to another sequence: Variation of SEQ ID NO: 180

SEQ ID NO: 333 - protein, 224 aa, Artificial Sequence; identical to SEQ ID NO: 309
  illustrative antigen binding domain 4
  Relationship to another sequence: Variation of SEQ ID NO: 180

SEQ ID NO: 334 - protein, 224 aa, Artificial Sequence; identical to SEQ ID NO: 309
  illustrative antigen binding domain 4
  Relationship to another sequence: Variation of SEQ ID NO: 180

SEQ ID NO: 335 - protein, 224 aa, Artificial Sequence; identical to SEQ ID NO: 309
  illustrative antigen binding domain 4
  Relationship to another sequence: Variation of SEQ ID NO: 180

SEQ ID NO: 336 - protein, 224 aa, Artificial Sequence; identical to SEQ ID NO: 309
  illustrative antigen binding domain 4
  Relationship to another sequence: Variation of SEQ ID NO: 180

SEQ ID NO: 337 - protein, 224 aa, Artificial Sequence; identical to SEQ ID NO: 309
  illustrative antigen binding domain 4
  Relationship to another sequence: Variation of SEQ ID NO: 180

SEQ ID NO: 338 - protein, 224 aa, Artificial Sequence
  illustrative antigen binding domain 5
  Relationship to another sequence: Variation of SEQ ID NO: 181
QVQLVQSGGGVVQPGGSLRVSCAASGVTLSDYGMHWVRQAPGKGLEWMAFIRNDGSDKYYADSVKGRFTISRDNSKKTVSLQMSSLRAEDTAVYYCAKNGESGPLDYWYFDLWGRGTDVVMTQSPSSLSASVGDRVTITCQASQDISNYLNWYQQEPGKAPKLLIYDETHLDSGVPSRFTGSRSGTDFTLTISSLQPEDFATYYCQQYDSLPPTFGGGTKVDIK

SEQ ID NO: 339 - protein, 224 aa, Artificial Sequence; identical to SEQ ID NO: 338
  illustrative antigen binding domain 5
  Relationship to another sequence: Variation of SEQ ID NO: 181

SEQ ID NO: 340 - protein, 224 aa, Artificial Sequence; identical to SEQ ID NO: 338
  illustrative antigen binding domain 5
  Relationship to another sequence: Variation of SEQ ID NO: 181

SEQ ID NO: 341 - protein, 224 aa, Artificial Sequence; identical to SEQ ID NO: 338
  illustrative antigen binding domain 5
  Relationship to another sequence: Variation of SEQ ID NO: 181

SEQ ID NO: 342 - protein, 224 aa, Artificial Sequence; identical to SEQ ID NO: 338
  illustrative antigen binding domain 5
  Relationship to another sequence: Variation of SEQ ID NO: 181

SEQ ID NO: 343 - protein, 224 aa, Artificial Sequence; identical to SEQ ID NO: 338
  illustrative antigen binding domain 5
  Relationship to another sequence: Variation of SEQ ID NO: 181

SEQ ID NO: 344 - protein, 224 aa, Artificial Sequence; identical to SEQ ID NO: 338
  illustrative antigen binding domain 5
  Relationship to another sequence: Variation of SEQ ID NO: 181

SEQ ID NO: 345 - protein, 224 aa, Artificial Sequence; identical to SEQ ID NO: 338
  illustrative antigen binding domain 5
  Relationship to another sequence: Variation of SEQ ID NO: 181

SEQ ID NO: 346 - protein, 224 aa, Artificial Sequence; identical to SEQ ID NO: 338
  illustrative antigen binding domain 5
  Relationship to another sequence: Variation of SEQ ID NO: 181

SEQ ID NO: 347 - protein, 224 aa, Artificial Sequence; identical to SEQ ID NO: 338
  illustrative antigen binding domain 5
  Relationship to another sequence: Variation of SEQ ID NO: 181

SEQ ID NO: 348 - protein, 224 aa, Artificial Sequence; identical to SEQ ID NO: 338
  illustrative antigen binding domain 5
  Relationship to another sequence: Variation of SEQ ID NO: 181

SEQ ID NO: 349 - protein, 224 aa, Artificial Sequence; identical to SEQ ID NO: 338
  illustrative antigen binding domain 5
  Relationship to another sequence: Variation of SEQ ID NO: 181

SEQ ID NO: 350 - protein, 224 aa, Artificial Sequence; identical to SEQ ID NO: 338
  illustrative antigen binding domain 5
  Relationship to another sequence: Variation of SEQ ID NO: 181

SEQ ID NO: 351 - protein, 224 aa, Artificial Sequence; identical to SEQ ID NO: 338
  illustrative antigen binding domain 5
  Relationship to another sequence: Variation of SEQ ID NO: 181

SEQ ID NO: 352 - protein, 224 aa, Artificial Sequence; identical to SEQ ID NO: 338
  illustrative antigen binding domain 5
  Relationship to another sequence: Variation of SEQ ID NO: 181

SEQ ID NO: 353 - protein, 224 aa, Artificial Sequence; identical to SEQ ID NO: 338
  illustrative antigen binding domain 5
  Relationship to another sequence: Variation of SEQ ID NO: 181

SEQ ID NO: 354 - protein, 224 aa, Artificial Sequence; identical to SEQ ID NO: 338
  illustrative antigen binding domain 5
  Relationship to another sequence: Variation of SEQ ID NO: 181

SEQ ID NO: 355 - protein, 224 aa, Artificial Sequence; identical to SEQ ID NO: 338
  illustrative antigen binding domain 5
  Relationship to another sequence: Variation of SEQ ID NO: 181

SEQ ID NO: 356 - protein, 224 aa, Artificial Sequence; identical to SEQ ID NO: 338
  illustrative antigen binding domain 5
  Relationship to another sequence: Variation of SEQ ID NO: 181

SEQ ID NO: 357 - protein, 224 aa, Artificial Sequence; identical to SEQ ID NO: 338
  illustrative antigen binding domain 5
  Relationship to another sequence: Variation of SEQ ID NO: 181

SEQ ID NO: 358 - protein, 224 aa, Artificial Sequence; identical to SEQ ID NO: 338
  illustrative antigen binding domain 5
  Relationship to another sequence: Variation of SEQ ID NO: 181

SEQ ID NO: 359 - protein, 224 aa, Artificial Sequence; identical to SEQ ID NO: 338
  illustrative antigen binding domain 5
  Relationship to another sequence: Variation of SEQ ID NO: 181

SEQ ID NO: 360 - protein, 224 aa, Artificial Sequence; identical to SEQ ID NO: 338
  illustrative antigen binding domain 5
  Relationship to another sequence: Variation of SEQ ID NO: 181

SEQ ID NO: 361 - protein, 224 aa, Artificial Sequence; identical to SEQ ID NO: 338
  illustrative antigen binding domain 5
  Relationship to another sequence: Variation of SEQ ID NO: 181

SEQ ID NO: 362 - protein, 224 aa, Artificial Sequence; identical to SEQ ID NO: 338
  illustrative antigen binding domain 5
  Relationship to another sequence: Variation of SEQ ID NO: 181

SEQ ID NO: 363 - protein, 224 aa, Artificial Sequence; identical to SEQ ID NO: 338
  illustrative antigen binding domain 5
  Relationship to another sequence: Variation of SEQ ID NO: 181

SEQ ID NO: 364 - protein, 224 aa, Artificial Sequence; identical to SEQ ID NO: 338
  illustrative antigen binding domain 5
  Relationship to another sequence: Variation of SEQ ID NO: 181

SEQ ID NO: 365 - protein, 224 aa, Artificial Sequence; identical to SEQ ID NO: 338
  illustrative antigen binding domain 5
  Relationship to another sequence: Variation of SEQ ID NO: 181

SEQ ID NO: 366 - protein, 224 aa, Artificial Sequence; identical to SEQ ID NO: 338
  illustrative antigen binding domain 5
  Relationship to another sequence: Variation of SEQ ID NO: 181

SEQ ID NO: 367 - protein, 223 aa, Artificial Sequence
  illustrative antigen binding domain 6
  Relationship to another sequence: Variation of SEQ ID NO: 182
QVQLVQSGGGVVQPGGSLRVSCAASGVTLSDYGMHWVRQAPGKGLEWMAFIRNDGSDKYYADSVKGRFTISRDNSKKTVSLQMSSLRAEDTAVYYCAKNGESGPLDYWYFDLWGRGTDVVMTQSPSSLSASVGDRVTITCQASQDISNYLNWYQQKPGKAPKLLIYDASNLETGVPSRFSGSGSGTDFTFTISSLQPEDIATYYCQQYDNLPITFGGGTKVDI

SEQ ID NO: 368 - protein, 223 aa, Artificial Sequence; identical to SEQ ID NO: 367
  illustrative antigen binding domain 6
  Relationship to another sequence: Variation of SEQ ID NO: 182

SEQ ID NO: 369 - protein, 223 aa, Artificial Sequence; identical to SEQ ID NO: 367
  illustrative antigen binding domain 6
  Relationship to another sequence: Variation of SEQ ID NO: 182

SEQ ID NO: 370 - protein, 223 aa, Artificial Sequence; identical to SEQ ID NO: 367
  illustrative antigen binding domain 6
  Relationship to another sequence: Variation of SEQ ID NO: 182

SEQ ID NO: 371 - protein, 223 aa, Artificial Sequence; identical to SEQ ID NO: 367
  illustrative antigen binding domain 6
  Relationship to another sequence: Variation of SEQ ID NO: 182

SEQ ID NO: 372 - protein, 223 aa, Artificial Sequence; identical to SEQ ID NO: 367
  illustrative antigen binding domain 6
  Relationship to another sequence: Variation of SEQ ID NO: 182

SEQ ID NO: 373 - protein, 223 aa, Artificial Sequence; identical to SEQ ID NO: 367
  illustrative antigen binding domain 6
  Relationship to another sequence: Variation of SEQ ID NO: 182

SEQ ID NO: 374 - protein, 223 aa, Artificial Sequence; identical to SEQ ID NO: 367
  illustrative antigen binding domain 6
  Relationship to another sequence: Variation of SEQ ID NO: 182

SEQ ID NO: 375 - protein, 223 aa, Artificial Sequence; identical to SEQ ID NO: 367
  illustrative antigen binding domain 6
  Relationship to another sequence: Variation of SEQ ID NO: 182

SEQ ID NO: 376 - protein, 223 aa, Artificial Sequence; identical to SEQ ID NO: 367
  illustrative antigen binding domain 6
  Relationship to another sequence: Variation of SEQ ID NO: 182

SEQ ID NO: 377 - protein, 223 aa, Artificial Sequence; identical to SEQ ID NO: 367
  illustrative antigen binding domain 6
  Relationship to another sequence: Variation of SEQ ID NO: 182

SEQ ID NO: 378 - protein, 223 aa, Artificial Sequence; identical to SEQ ID NO: 367
  illustrative antigen binding domain 6
  Relationship to another sequence: Variation of SEQ ID NO: 182

SEQ ID NO: 379 - protein, 223 aa, Artificial Sequence; identical to SEQ ID NO: 367
  illustrative antigen binding domain 6
  Relationship to another sequence: Variation of SEQ ID NO: 182

SEQ ID NO: 380 - protein, 223 aa, Artificial Sequence; identical to SEQ ID NO: 367
  illustrative antigen binding domain 6
  Relationship to another sequence: Variation of SEQ ID NO: 182

SEQ ID NO: 381 - protein, 223 aa, Artificial Sequence; identical to SEQ ID NO: 367
  illustrative antigen binding domain 6
  Relationship to another sequence: Variation of SEQ ID NO: 182

SEQ ID NO: 382 - protein, 223 aa, Artificial Sequence; identical to SEQ ID NO: 367
  illustrative antigen binding domain 6
  Relationship to another sequence: Variation of SEQ ID NO: 182

SEQ ID NO: 383 - protein, 223 aa, Artificial Sequence; identical to SEQ ID NO: 367
  illustrative antigen binding domain 6
  Relationship to another sequence: Variation of SEQ ID NO: 182

SEQ ID NO: 384 - protein, 223 aa, Artificial Sequence; identical to SEQ ID NO: 367
  illustrative antigen binding domain 6
  Relationship to another sequence: Variation of SEQ ID NO: 182

SEQ ID NO: 385 - protein, 223 aa, Artificial Sequence; identical to SEQ ID NO: 367
  illustrative antigen binding domain 6
  Relationship to another sequence: Variation of SEQ ID NO: 182

SEQ ID NO: 386 - protein, 223 aa, Artificial Sequence; identical to SEQ ID NO: 367
  illustrative antigen binding domain 6
  Relationship to another sequence: Variation of SEQ ID NO: 182

SEQ ID NO: 387 - protein, 223 aa, Artificial Sequence; identical to SEQ ID NO: 367
  illustrative antigen binding domain 6
  Relationship to another sequence: Variation of SEQ ID NO: 182

SEQ ID NO: 388 - protein, 223 aa, Artificial Sequence; identical to SEQ ID NO: 367
  illustrative antigen binding domain 6
  Relationship to another sequence: Variation of SEQ ID NO: 182

SEQ ID NO: 389 - protein, 223 aa, Artificial Sequence; identical to SEQ ID NO: 367
  illustrative antigen binding domain 6
  Relationship to another sequence: Variation of SEQ ID NO: 182

SEQ ID NO: 390 - protein, 223 aa, Artificial Sequence; identical to SEQ ID NO: 367
  illustrative antigen binding domain 6
  Relationship to another sequence: Variation of SEQ ID NO: 182

SEQ ID NO: 391 - protein, 223 aa, Artificial Sequence; identical to SEQ ID NO: 367
  illustrative antigen binding domain 6
  Relationship to another sequence: Variation of SEQ ID NO: 182

SEQ ID NO: 392 - protein, 223 aa, Artificial Sequence; identical to SEQ ID NO: 367
  illustrative antigen binding domain 6
  Relationship to another sequence: Variation of SEQ ID NO: 182

SEQ ID NO: 393 - protein, 223 aa, Artificial Sequence; identical to SEQ ID NO: 367
  illustrative antigen binding domain 6
  Relationship to another sequence: Variation of SEQ ID NO: 182

SEQ ID NO: 394 - protein, 223 aa, Artificial Sequence; identical to SEQ ID NO: 367
  illustrative antigen binding domain 6
  Relationship to another sequence: Variation of SEQ ID NO: 182

SEQ ID NO: 395 - protein, 223 aa, Artificial Sequence; identical to SEQ ID NO: 367
  illustrative antigen binding domain 6
  Relationship to another sequence: Variation of SEQ ID NO: 182

SEQ ID NO: 396 - protein, 224 aa, Artificial Sequence
  illustrative antigen binding domain 7
  Relationship to another sequence: Variation of SEQ ID NO: 183
QVQLVQSGGGVVQPGGSLRVSCAASGVTLSDYGMHWVRQAPGKGLEWMAFIRNDGSDKYYADSVKGRFTISRDNSKKTVSLQMSSLRAEDTAVYYCAKNGESGPLDYWYFDLWGRGTDVVMTQSPSSLSASVGDRVTITCQASQDISNYLNWYQQKPGKAPKLLIYDASNLETGVPSRFSGSGSGTDFTFTISSLQPEDIATYYCQQYDNLPSTFGGGTKVDIK

SEQ ID NO: 397 - protein, 224 aa, Artificial Sequence; identical to SEQ ID NO: 396
  illustrative antigen binding domain 7
  Relationship to another sequence: Variation of SEQ ID NO: 183

SEQ ID NO: 398 - protein, 224 aa, Artificial Sequence; identical to SEQ ID NO: 396
  illustrative antigen binding domain 7
  Relationship to another sequence: Variation of SEQ ID NO: 183

SEQ ID NO: 399 - protein, 224 aa, Artificial Sequence; identical to SEQ ID NO: 396
  illustrative antigen binding domain 7
  Relationship to another sequence: Variation of SEQ ID NO: 183

SEQ ID NO: 400 - protein, 224 aa, Artificial Sequence; identical to SEQ ID NO: 396
  illustrative antigen binding domain 7
  Relationship to another sequence: Variation of SEQ ID NO: 183

SEQ ID NO: 401 - protein, 224 aa, Artificial Sequence; identical to SEQ ID NO: 396
  illustrative antigen binding domain 7
  Relationship to another sequence: Variation of SEQ ID NO: 183

SEQ ID NO: 402 - protein, 224 aa, Artificial Sequence; identical to SEQ ID NO: 396
  illustrative antigen binding domain 7
  Relationship to another sequence: Variation of SEQ ID NO: 183

SEQ ID NO: 403 - protein, 224 aa, Artificial Sequence; identical to SEQ ID NO: 396
  illustrative antigen binding domain 7
  Relationship to another sequence: Variation of SEQ ID NO: 183

SEQ ID NO: 404 - protein, 224 aa, Artificial Sequence; identical to SEQ ID NO: 396
  illustrative antigen binding domain 7
  Relationship to another sequence: Variation of SEQ ID NO: 183

SEQ ID NO: 405 - protein, 224 aa, Artificial Sequence; identical to SEQ ID NO: 396
  illustrative antigen binding domain 7
  Relationship to another sequence: Variation of SEQ ID NO: 183

SEQ ID NO: 406 - protein, 224 aa, Artificial Sequence; identical to SEQ ID NO: 396
  illustrative antigen binding domain 7
  Relationship to another sequence: Variation of SEQ ID NO: 183

SEQ ID NO: 407 - protein, 224 aa, Artificial Sequence; identical to SEQ ID NO: 396
  illustrative antigen binding domain 7
  Relationship to another sequence: Variation of SEQ ID NO: 183

SEQ ID NO: 408 - protein, 224 aa, Artificial Sequence; identical to SEQ ID NO: 396
  illustrative antigen binding domain 7
  Relationship to another sequence: Variation of SEQ ID NO: 183

SEQ ID NO: 409 - protein, 224 aa, Artificial Sequence; identical to SEQ ID NO: 396
  illustrative antigen binding domain 7
  Relationship to another sequence: Variation of SEQ ID NO: 183

SEQ ID NO: 410 - protein, 224 aa, Artificial Sequence; identical to SEQ ID NO: 396
  illustrative antigen binding domain 7
  Relationship to another sequence: Variation of SEQ ID NO: 183

SEQ ID NO: 411 - protein, 224 aa, Artificial Sequence; identical to SEQ ID NO: 396
  illustrative antigen binding domain 7
  Relationship to another sequence: Variation of SEQ ID NO: 183

SEQ ID NO: 412 - protein, 224 aa, Artificial Sequence; identical to SEQ ID NO: 396
  illustrative antigen binding domain 7
  Relationship to another sequence: Variation of SEQ ID NO: 183

SEQ ID NO: 413 - protein, 224 aa, Artificial Sequence; identical to SEQ ID NO: 396
  illustrative antigen binding domain 7
  Relationship to another sequence: Variation of SEQ ID NO: 183

SEQ ID NO: 414 - protein, 224 aa, Artificial Sequence; identical to SEQ ID NO: 396
  illustrative antigen binding domain 7
  Relationship to another sequence: Variation of SEQ ID NO: 183

SEQ ID NO: 415 - protein, 224 aa, Artificial Sequence; identical to SEQ ID NO: 396
  illustrative antigen binding domain 7
  Relationship to another sequence: Variation of SEQ ID NO: 183

SEQ ID NO: 416 - protein, 224 aa, Artificial Sequence; identical to SEQ ID NO: 396
  illustrative antigen binding domain 7
  Relationship to another sequence: Variation of SEQ ID NO: 183

SEQ ID NO: 417 - protein, 224 aa, Artificial Sequence; identical to SEQ ID NO: 396
  illustrative antigen binding domain 7
  Relationship to another sequence: Variation of SEQ ID NO: 183

SEQ ID NO: 418 - protein, 224 aa, Artificial Sequence; identical to SEQ ID NO: 396
  illustrative antigen binding domain 7
  Relationship to another sequence: Variation of SEQ ID NO: 183

SEQ ID NO: 419 - protein, 224 aa, Artificial Sequence; identical to SEQ ID NO: 396
  illustrative antigen binding domain 7
  Relationship to another sequence: Variation of SEQ ID NO: 183

SEQ ID NO: 420 - protein, 224 aa, Artificial Sequence; identical to SEQ ID NO: 396
  illustrative antigen binding domain 7
  Relationship to another sequence: Variation of SEQ ID NO: 183

SEQ ID NO: 421 - protein, 224 aa, Artificial Sequence; identical to SEQ ID NO: 396
  illustrative antigen binding domain 7
  Relationship to another sequence: Variation of SEQ ID NO: 183

SEQ ID NO: 422 - protein, 224 aa, Artificial Sequence; identical to SEQ ID NO: 396
  illustrative antigen binding domain 7
  Relationship to another sequence: Variation of SEQ ID NO: 183

SEQ ID NO: 423 - protein, 224 aa, Artificial Sequence; identical to SEQ ID NO: 396
  illustrative antigen binding domain 7
  Relationship to another sequence: Variation of SEQ ID NO: 183

SEQ ID NO: 424 - protein, 224 aa, Artificial Sequence; identical to SEQ ID NO: 396
  illustrative antigen binding domain 7
  Relationship to another sequence: Variation of SEQ ID NO: 183

SEQ ID NO: 425 - protein, 224 aa, Artificial Sequence
  illustrative antigen binding domain 8
  Relationship to another sequence: Variation of SEQ ID NO: 184
QVQLVQSGGGVVQPGGSLRVSCAASGVTLSDYGMHWVRQAPGKGLEWMAFIRNDGSDKYYADSVKGRFTISRDNSKKTVSLQMSSLRAEDTAVYYCAKNGESGPLDYWYFDLWGRGTDVVMTQSPSSLSASVGDRVTITCQASQDISNYLNWYQQKPGKAPKLLIYDASNLETGVPSRFSGSGSGTDFTFTISSLQPEDFGTYYCQQYNTYPLTFGGGTKVDIK

SEQ ID NO: 426 - protein, 224 aa, Artificial Sequence; identical to SEQ ID NO: 425
  illustrative antigen binding domain 8
  Relationship to another sequence: Variation of SEQ ID NO: 184

SEQ ID NO: 427 - protein, 224 aa, Artificial Sequence; identical to SEQ ID NO: 425
  illustrative antigen binding domain 8
  Relationship to another sequence: Variation of SEQ ID NO: 184

SEQ ID NO: 428 - protein, 224 aa, Artificial Sequence; identical to SEQ ID NO: 425
  illustrative antigen binding domain 8
  Relationship to another sequence: Variation of SEQ ID NO: 184

SEQ ID NO: 429 - protein, 224 aa, Artificial Sequence; identical to SEQ ID NO: 425
  illustrative antigen binding domain 8
  Relationship to another sequence: Variation of SEQ ID NO: 184

SEQ ID NO: 430 - protein, 224 aa, Artificial Sequence; identical to SEQ ID NO: 425
  illustrative antigen binding domain 8
  Relationship to another sequence: Variation of SEQ ID NO: 184

SEQ ID NO: 431 - protein, 224 aa, Artificial Sequence; identical to SEQ ID NO: 425
  illustrative antigen binding domain 8
  Relationship to another sequence: Variation of SEQ ID NO: 184

SEQ ID NO: 432 - protein, 224 aa, Artificial Sequence; identical to SEQ ID NO: 425
  illustrative antigen binding domain 8
  Relationship to another sequence: Variation of SEQ ID NO: 184

SEQ ID NO: 433 - protein, 224 aa, Artificial Sequence; identical to SEQ ID NO: 425
  illustrative antigen binding domain 8
  Relationship to another sequence: Variation of SEQ ID NO: 184

SEQ ID NO: 434 - protein, 224 aa, Artificial Sequence; identical to SEQ ID NO: 425
  illustrative antigen binding domain 8
  Relationship to another sequence: Variation of SEQ ID NO: 184

SEQ ID NO: 435 - protein, 224 aa, Artificial Sequence; identical to SEQ ID NO: 425
  illustrative antigen binding domain 8
  Relationship to another sequence: Variation of SEQ ID NO: 184

SEQ ID NO: 436 - protein, 224 aa, Artificial Sequence; identical to SEQ ID NO: 425
  illustrative antigen binding domain 8
  Relationship to another sequence: Variation of SEQ ID NO: 184

SEQ ID NO: 437 - protein, 224 aa, Artificial Sequence; identical to SEQ ID NO: 425
  illustrative antigen binding domain 8
  Relationship to another sequence: Variation of SEQ ID NO: 184

SEQ ID NO: 438 - protein, 224 aa, Artificial Sequence; identical to SEQ ID NO: 425
  illustrative antigen binding domain 8
  Relationship to another sequence: Variation of SEQ ID NO: 184

SEQ ID NO: 439 - protein, 224 aa, Artificial Sequence; identical to SEQ ID NO: 425
  illustrative antigen binding domain 8
  Relationship to another sequence: Variation of SEQ ID NO: 184

SEQ ID NO: 440 - protein, 224 aa, Artificial Sequence; identical to SEQ ID NO: 425
  illustrative antigen binding domain 8
  Relationship to another sequence: Variation of SEQ ID NO: 184

SEQ ID NO: 441 - protein, 224 aa, Artificial Sequence; identical to SEQ ID NO: 425
  illustrative antigen binding domain 8
  Relationship to another sequence: Variation of SEQ ID NO: 184

SEQ ID NO: 442 - protein, 224 aa, Artificial Sequence; identical to SEQ ID NO: 425
  illustrative antigen binding domain 8
  Relationship to another sequence: Variation of SEQ ID NO: 184

SEQ ID NO: 443 - protein, 224 aa, Artificial Sequence; identical to SEQ ID NO: 425
  illustrative antigen binding domain 8
  Relationship to another sequence: Variation of SEQ ID NO: 184

SEQ ID NO: 444 - protein, 224 aa, Artificial Sequence; identical to SEQ ID NO: 425
  illustrative antigen binding domain 8
  Relationship to another sequence: Variation of SEQ ID NO: 184

SEQ ID NO: 445 - protein, 224 aa, Artificial Sequence; identical to SEQ ID NO: 425
  illustrative antigen binding domain 8
  Relationship to another sequence: Variation of SEQ ID NO: 184

SEQ ID NO: 446 - protein, 224 aa, Artificial Sequence; identical to SEQ ID NO: 425
  illustrative antigen binding domain 8
  Relationship to another sequence: Variation of SEQ ID NO: 184

SEQ ID NO: 447 - protein, 224 aa, Artificial Sequence; identical to SEQ ID NO: 425
  illustrative antigen binding domain 8
  Relationship to another sequence: Variation of SEQ ID NO: 184

SEQ ID NO: 448 - protein, 224 aa, Artificial Sequence; identical to SEQ ID NO: 425
  illustrative antigen binding domain 8
  Relationship to another sequence: Variation of SEQ ID NO: 184

SEQ ID NO: 449 - protein, 224 aa, Artificial Sequence; identical to SEQ ID NO: 425
  illustrative antigen binding domain 8
  Relationship to another sequence: Variation of SEQ ID NO: 184

SEQ ID NO: 450 - protein, 224 aa, Artificial Sequence; identical to SEQ ID NO: 425
  illustrative antigen binding domain 8
  Relationship to another sequence: Variation of SEQ ID NO: 184

SEQ ID NO: 451 - protein, 224 aa, Artificial Sequence; identical to SEQ ID NO: 425
  illustrative antigen binding domain 8
  Relationship to another sequence: Variation of SEQ ID NO: 184

SEQ ID NO: 452 - protein, 224 aa, Artificial Sequence; identical to SEQ ID NO: 425
  illustrative antigen binding domain 8
  Relationship to another sequence: Variation of SEQ ID NO: 184

SEQ ID NO: 453 - protein, 224 aa, Artificial Sequence; identical to SEQ ID NO: 425
  illustrative antigen binding domain 8
  Relationship to another sequence: Variation of SEQ ID NO: 184

SEQ ID NO: 454 - protein, 224 aa, Artificial Sequence
  illustrative antigen binding domain 9
  Relationship to another sequence: Variation of SEQ ID NO: 185
QVQLVQSGGGVVQPGGSLRVSCAASGVTLSDYGMHWVRQAPGKGLEWMAFIRNDGSDKYYADSVKGRFTISRDNSKKTVSLQMSSLRAEDTAVYYCAKNGESGPLDYWYFDLWGRGTDVVMTQSPSSLTASVGDRVTITCQASQDISNYLNWYQQKPGKAPKLLIYDASNLETGVPSRFSGSGSGTDFTLSIDSLQPEDFATYYCQQYHTYPLTFGGGTKVDIK

SEQ ID NO: 455 - protein, 224 aa, Artificial Sequence; identical to SEQ ID NO: 454
  illustrative antigen binding domain 9
  Relationship to another sequence: Variation of SEQ ID NO: 185

SEQ ID NO: 456 - protein, 224 aa, Artificial Sequence; identical to SEQ ID NO: 454
  illustrative antigen binding domain 9
  Relationship to another sequence: Variation of SEQ ID NO: 185

SEQ ID NO: 457 - protein, 224 aa, Artificial Sequence; identical to SEQ ID NO: 454
  illustrative antigen binding domain 9
  Relationship to another sequence: Variation of SEQ ID NO: 185

SEQ ID NO: 458 - protein, 224 aa, Artificial Sequence; identical to SEQ ID NO: 454
  illustrative antigen binding domain 9
  Relationship to another sequence: Variation of SEQ ID NO: 185

SEQ ID NO: 459 - protein, 224 aa, Artificial Sequence; identical to SEQ ID NO: 454
  illustrative antigen binding domain 9
  Relationship to another sequence: Variation of SEQ ID NO: 185

SEQ ID NO: 460 - protein, 224 aa, Artificial Sequence; identical to SEQ ID NO: 454
  illustrative antigen binding domain 9
  Relationship to another sequence: Variation of SEQ ID NO: 185

SEQ ID NO: 461 - protein, 224 aa, Artificial Sequence; identical to SEQ ID NO: 454
  illustrative antigen binding domain 9
  Relationship to another sequence: Variation of SEQ ID NO: 185

SEQ ID NO: 462 - protein, 224 aa, Artificial Sequence; identical to SEQ ID NO: 454
  illustrative antigen binding domain 9
  Relationship to another sequence: Variation of SEQ ID NO: 185

SEQ ID NO: 463 - protein, 224 aa, Artificial Sequence; identical to SEQ ID NO: 454
  illustrative antigen binding domain 9
  Relationship to another sequence: Variation of SEQ ID NO: 185

SEQ ID NO: 464 - protein, 224 aa, Artificial Sequence; identical to SEQ ID NO: 454
  illustrative antigen binding domain 9
  Relationship to another sequence: Variation of SEQ ID NO: 185

SEQ ID NO: 465 - protein, 224 aa, Artificial Sequence; identical to SEQ ID NO: 454
  illustrative antigen binding domain 9
  Relationship to another sequence: Variation of SEQ ID NO: 185

SEQ ID NO: 466 - protein, 224 aa, Artificial Sequence; identical to SEQ ID NO: 454
  illustrative antigen binding domain 9
  Relationship to another sequence: Variation of SEQ ID NO: 185

SEQ ID NO: 467 - protein, 224 aa, Artificial Sequence; identical to SEQ ID NO: 454
  illustrative antigen binding domain 9
  Relationship to another sequence: Variation of SEQ ID NO: 185

SEQ ID NO: 468 - protein, 224 aa, Artificial Sequence; identical to SEQ ID NO: 454
  illustrative antigen binding domain 9
  Relationship to another sequence: Variation of SEQ ID NO: 185

SEQ ID NO: 469 - protein, 224 aa, Artificial Sequence; identical to SEQ ID NO: 454
  illustrative antigen binding domain 9
  Relationship to another sequence: Variation of SEQ ID NO: 185

SEQ ID NO: 470 - protein, 224 aa, Artificial Sequence; identical to SEQ ID NO: 454
  illustrative antigen binding domain 9
  Relationship to another sequence: Variation of SEQ ID NO: 185

SEQ ID NO: 471 - protein, 224 aa, Artificial Sequence; identical to SEQ ID NO: 454
  illustrative antigen binding domain 9
  Relationship to another sequence: Variation of SEQ ID NO: 185

SEQ ID NO: 472 - protein, 224 aa, Artificial Sequence; identical to SEQ ID NO: 454
  illustrative antigen binding domain 9
  Relationship to another sequence: Variation of SEQ ID NO: 185

SEQ ID NO: 473 - protein, 224 aa, Artificial Sequence; identical to SEQ ID NO: 454
  illustrative antigen binding domain 9
  Relationship to another sequence: Variation of SEQ ID NO: 185

SEQ ID NO: 474 - protein, 224 aa, Artificial Sequence; identical to SEQ ID NO: 454
  illustrative antigen binding domain 9
  Relationship to another sequence: Variation of SEQ ID NO: 185

SEQ ID NO: 475 - protein, 224 aa, Artificial Sequence; identical to SEQ ID NO: 454
  illustrative antigen binding domain 9
  Relationship to another sequence: Variation of SEQ ID NO: 185

SEQ ID NO: 476 - protein, 224 aa, Artificial Sequence; identical to SEQ ID NO: 454
  illustrative antigen binding domain 9
  Relationship to another sequence: Variation of SEQ ID NO: 185

SEQ ID NO: 477 - protein, 224 aa, Artificial Sequence; identical to SEQ ID NO: 454
  illustrative antigen binding domain 9
  Relationship to another sequence: Variation of SEQ ID NO: 185

SEQ ID NO: 478 - protein, 224 aa, Artificial Sequence; identical to SEQ ID NO: 454
  illustrative antigen binding domain 9
  Relationship to another sequence: Variation of SEQ ID NO: 185

SEQ ID NO: 479 - protein, 224 aa, Artificial Sequence; identical to SEQ ID NO: 454
  illustrative antigen binding domain 9
  Relationship to another sequence: Variation of SEQ ID NO: 185

SEQ ID NO: 480 - protein, 224 aa, Artificial Sequence; identical to SEQ ID NO: 454
  illustrative antigen binding domain 9
  Relationship to another sequence: Variation of SEQ ID NO: 185

SEQ ID NO: 481 - protein, 224 aa, Artificial Sequence; identical to SEQ ID NO: 454
  illustrative antigen binding domain 9
  Relationship to another sequence: Variation of SEQ ID NO: 185

SEQ ID NO: 482 - protein, 224 aa, Artificial Sequence; identical to SEQ ID NO: 454
  illustrative antigen binding domain 9
  Relationship to another sequence: Variation of SEQ ID NO: 185

SEQ ID NO: 483 - protein, 224 aa, Artificial Sequence; identical to SEQ ID NO: 454
  illustrative antigen binding domain 10
  Relationship to another sequence: Variation of SEQ ID NO: 186

SEQ ID NO: 484 - protein, 224 aa, Artificial Sequence; identical to SEQ ID NO: 454
  illustrative antigen binding domain 10
  Relationship to another sequence: Variation of SEQ ID NO: 186

SEQ ID NO: 485 - protein, 224 aa, Artificial Sequence; identical to SEQ ID NO: 454
  illustrative antigen binding domain 10
  Relationship to another sequence: Variation of SEQ ID NO: 186

SEQ ID NO: 486 - protein, 224 aa, Artificial Sequence; identical to SEQ ID NO: 454
  illustrative antigen binding domain 10
  Relationship to another sequence: Variation of SEQ ID NO: 186

SEQ ID NO: 487 - protein, 224 aa, Artificial Sequence; identical to SEQ ID NO: 454
  illustrative antigen binding domain 10
  Relationship to another sequence: Variation of SEQ ID NO: 186

SEQ ID NO: 488 - protein, 224 aa, Artificial Sequence; identical to SEQ ID NO: 454
  illustrative antigen binding domain 10
  Relationship to another sequence: Variation of SEQ ID NO: 186

SEQ ID NO: 489 - protein, 224 aa, Artificial Sequence; identical to SEQ ID NO: 454
  illustrative antigen binding domain 10
  Relationship to another sequence: Variation of SEQ ID NO: 186

SEQ ID NO: 490 - protein, 224 aa, Artificial Sequence; identical to SEQ ID NO: 454
  illustrative antigen binding domain 10
  Relationship to another sequence: Variation of SEQ ID NO: 186

SEQ ID NO: 491 - protein, 224 aa, Artificial Sequence; identical to SEQ ID NO: 454
  illustrative antigen binding domain 10
  Relationship to another sequence: Variation of SEQ ID NO: 186

SEQ ID NO: 492 - protein, 224 aa, Artificial Sequence; identical to SEQ ID NO: 454
  illustrative antigen binding domain 10
  Relationship to another sequence: Variation of SEQ ID NO: 186

SEQ ID NO: 493 - protein, 224 aa, Artificial Sequence; identical to SEQ ID NO: 454
  illustrative antigen binding domain 10
  Relationship to another sequence: Variation of SEQ ID NO: 186

SEQ ID NO: 494 - protein, 224 aa, Artificial Sequence; identical to SEQ ID NO: 454
  illustrative antigen binding domain 10
  Relationship to another sequence: Variation of SEQ ID NO: 186

SEQ ID NO: 495 - protein, 224 aa, Artificial Sequence; identical to SEQ ID NO: 454
  illustrative antigen binding domain 10
  Relationship to another sequence: Variation of SEQ ID NO: 186

SEQ ID NO: 496 - protein, 224 aa, Artificial Sequence; identical to SEQ ID NO: 454
  illustrative antigen binding domain 10
  Relationship to another sequence: Variation of SEQ ID NO: 186

SEQ ID NO: 497 - protein, 224 aa, Artificial Sequence; identical to SEQ ID NO: 454
  illustrative antigen binding domain 10
  Relationship to another sequence: Variation of SEQ ID NO: 186

SEQ ID NO: 498 - protein, 224 aa, Artificial Sequence; identical to SEQ ID NO: 454
  illustrative antigen binding domain 10
  Relationship to another sequence: Variation of SEQ ID NO: 186

SEQ ID NO: 499 - protein, 224 aa, Artificial Sequence; identical to SEQ ID NO: 454
  illustrative antigen binding domain 10
  Relationship to another sequence: Variation of SEQ ID NO: 186

SEQ ID NO: 500 - protein, 224 aa, Artificial Sequence; identical to SEQ ID NO: 454
  illustrative antigen binding domain 10
  Relationship to another sequence: Variation of SEQ ID NO: 186

SEQ ID NO: 501 - protein, 224 aa, Artificial Sequence; identical to SEQ ID NO: 454
  illustrative antigen binding domain 10
  Relationship to another sequence: Variation of SEQ ID NO: 186

SEQ ID NO: 502 - protein, 224 aa, Artificial Sequence; identical to SEQ ID NO: 454
  illustrative antigen binding domain 10
  Relationship to another sequence: Variation of SEQ ID NO: 186

SEQ ID NO: 503 - protein, 224 aa, Artificial Sequence; identical to SEQ ID NO: 454
  illustrative antigen binding domain 10
  Relationship to another sequence: Variation of SEQ ID NO: 186

SEQ ID NO: 504 - protein, 224 aa, Artificial Sequence; identical to SEQ ID NO: 454
  illustrative antigen binding domain 10
  Relationship to another sequence: Variation of SEQ ID NO: 186

SEQ ID NO: 505 - protein, 224 aa, Artificial Sequence; identical to SEQ ID NO: 454
  illustrative antigen binding domain 10
  Relationship to another sequence: Variation of SEQ ID NO: 186

SEQ ID NO: 506 - protein, 224 aa, Artificial Sequence; identical to SEQ ID NO: 454
  illustrative antigen binding domain 10
  Relationship to another sequence: Variation of SEQ ID NO: 186

SEQ ID NO: 507 - protein, 224 aa, Artificial Sequence; identical to SEQ ID NO: 454
  illustrative antigen binding domain 10
  Relationship to another sequence: Variation of SEQ ID NO: 186

SEQ ID NO: 508 - protein, 224 aa, Artificial Sequence; identical to SEQ ID NO: 454
  illustrative antigen binding domain 10
  Relationship to another sequence: Variation of SEQ ID NO: 186

SEQ ID NO: 509 - protein, 224 aa, Artificial Sequence; identical to SEQ ID NO: 454
  illustrative antigen binding domain 10
  Relationship to another sequence: Variation of SEQ ID NO: 186

SEQ ID NO: 510 - protein, 224 aa, Artificial Sequence; identical to SEQ ID NO: 454
  illustrative antigen binding domain 10
  Relationship to another sequence: Variation of SEQ ID NO: 186

SEQ ID NO: 511 - protein, 224 aa, Artificial Sequence; identical to SEQ ID NO: 454
  illustrative antigen binding domain 10
  Relationship to another sequence: Variation of SEQ ID NO: 186

SEQ ID NO: 512 - protein, 224 aa, Artificial Sequence
  illustrative antigen binding domain 11
  Relationship to another sequence: Variation of SEQ ID NO: 187
QVQLVQSGGGVVQPGGSLRVSCAASGVTLSDYGMHWVRQAPGKGLEWMAFIRNDGSDKYYADSVKGRFTISRDNSKKTVSLQMSSLRAEDTAVYYCAKNGESGPLDYWYFDLWGRGTDVVMTQSPSSLSASVGDRVTITCRTSQGISSALAWYQQKPGKAPKLLIYDASSLESGVPSRFSGSGSGTDFTLTISSLQPEDFATYYCQQFNNYPLTFGGGTKVDIK

SEQ ID NO: 513 - protein, 224 aa, Artificial Sequence; identical to SEQ ID NO: 512
  illustrative antigen binding domain 11
  Relationship to another sequence: Variation of SEQ ID NO: 187

SEQ ID NO: 514 - protein, 224 aa, Artificial Sequence; identical to SEQ ID NO: 512
  illustrative antigen binding domain 11
  Relationship to another sequence: Variation of SEQ ID NO: 187

SEQ ID NO: 515 - protein, 224 aa, Artificial Sequence; identical to SEQ ID NO: 512
  illustrative antigen binding domain 11
  Relationship to another sequence: Variation of SEQ ID NO: 187

SEQ ID NO: 516 - protein, 224 aa, Artificial Sequence; identical to SEQ ID NO: 512
  illustrative antigen binding domain 11
  Relationship to another sequence: Variation of SEQ ID NO: 187

SEQ ID NO: 517 - protein, 224 aa, Artificial Sequence; identical to SEQ ID NO: 512
  illustrative antigen binding domain 11
  Relationship to another sequence: Variation of SEQ ID NO: 187

SEQ ID NO: 518 - protein, 224 aa, Artificial Sequence; identical to SEQ ID NO: 512
  illustrative antigen binding domain 11
  Relationship to another sequence: Variation of SEQ ID NO: 187

SEQ ID NO: 519 - protein, 224 aa, Artificial Sequence; identical to SEQ ID NO: 512
  illustrative antigen binding domain 11
  Relationship to another sequence: Variation of SEQ ID NO: 187

SEQ ID NO: 520 - protein, 224 aa, Artificial Sequence; identical to SEQ ID NO: 512
  illustrative antigen binding domain 11
  Relationship to another sequence: Variation of SEQ ID NO: 187

SEQ ID NO: 521 - protein, 224 aa, Artificial Sequence; identical to SEQ ID NO: 512
  illustrative antigen binding domain 11
  Relationship to another sequence: Variation of SEQ ID NO: 187

SEQ ID NO: 522 - protein, 224 aa, Artificial Sequence; identical to SEQ ID NO: 512
  illustrative antigen binding domain 11
  Relationship to another sequence: Variation of SEQ ID NO: 187

SEQ ID NO: 523 - protein, 224 aa, Artificial Sequence; identical to SEQ ID NO: 512
  illustrative antigen binding domain 11
  Relationship to another sequence: Variation of SEQ ID NO: 187

SEQ ID NO: 524 - protein, 224 aa, Artificial Sequence; identical to SEQ ID NO: 512
  illustrative antigen binding domain 11
  Relationship to another sequence: Variation of SEQ ID NO: 187

SEQ ID NO: 525 - protein, 224 aa, Artificial Sequence; identical to SEQ ID NO: 512
  illustrative antigen binding domain 11
  Relationship to another sequence: Variation of SEQ ID NO: 187

SEQ ID NO: 526 - protein, 224 aa, Artificial Sequence; identical to SEQ ID NO: 512
  illustrative antigen binding domain 11
  Relationship to another sequence: Variation of SEQ ID NO: 187

SEQ ID NO: 527 - protein, 224 aa, Artificial Sequence; identical to SEQ ID NO: 512
  illustrative antigen binding domain 11
  Relationship to another sequence: Variation of SEQ ID NO: 187

SEQ ID NO: 528 - protein, 224 aa, Artificial Sequence; identical to SEQ ID NO: 512
  illustrative antigen binding domain 11
  Relationship to another sequence: Variation of SEQ ID NO: 187

SEQ ID NO: 529 - protein, 224 aa, Artificial Sequence; identical to SEQ ID NO: 512
  illustrative antigen binding domain 11
  Relationship to another sequence: Variation of SEQ ID NO: 187

SEQ ID NO: 530 - protein, 224 aa, Artificial Sequence; identical to SEQ ID NO: 512
  illustrative antigen binding domain 11
  Relationship to another sequence: Variation of SEQ ID NO: 187

SEQ ID NO: 531 - protein, 224 aa, Artificial Sequence; identical to SEQ ID NO: 512
  illustrative antigen binding domain 11
  Relationship to another sequence: Variation of SEQ ID NO: 187

SEQ ID NO: 532 - protein, 224 aa, Artificial Sequence; identical to SEQ ID NO: 512
  illustrative antigen binding domain 11
  Relationship to another sequence: Variation of SEQ ID NO: 187

SEQ ID NO: 533 - protein, 224 aa, Artificial Sequence; identical to SEQ ID NO: 512
  illustrative antigen binding domain 11
  Relationship to another sequence: Variation of SEQ ID NO: 187

SEQ ID NO: 534 - protein, 224 aa, Artificial Sequence; identical to SEQ ID NO: 512
  illustrative antigen binding domain 11
  Relationship to another sequence: Variation of SEQ ID NO: 187

SEQ ID NO: 535 - protein, 224 aa, Artificial Sequence; identical to SEQ ID NO: 512
  illustrative antigen binding domain 11
  Relationship to another sequence: Variation of SEQ ID NO: 187

SEQ ID NO: 536 - protein, 224 aa, Artificial Sequence; identical to SEQ ID NO: 512
  illustrative antigen binding domain 11
  Relationship to another sequence: Variation of SEQ ID NO: 187

SEQ ID NO: 537 - protein, 224 aa, Artificial Sequence; identical to SEQ ID NO: 512
  illustrative antigen binding domain 11
  Relationship to another sequence: Variation of SEQ ID NO: 187

SEQ ID NO: 538 - protein, 224 aa, Artificial Sequence; identical to SEQ ID NO: 512
  illustrative antigen binding domain 11
  Relationship to another sequence: Variation of SEQ ID NO: 187

SEQ ID NO: 539 - protein, 224 aa, Artificial Sequence; identical to SEQ ID NO: 512
  illustrative antigen binding domain 11
  Relationship to another sequence: Variation of SEQ ID NO: 187

SEQ ID NO: 540 - protein, 224 aa, Artificial Sequence; identical to SEQ ID NO: 512
  illustrative antigen binding domain 11
  Relationship to another sequence: Variation of SEQ ID NO: 187

SEQ ID NO: 541 - protein, 224 aa, Artificial Sequence
  illustrative antigen binding domain 12
  Relationship to another sequence: Variation of SEQ ID NO: 188
QVQLVQSGGGVVQPGGSLRVSCAASGVTLSDYGMHWVRQAPGKGLEWMAFIRNDGSDKYYADSVKGRFTISRDNSKKTVSLQMSSLRAEDTAVYYCAKNGESGPLDYWYFDLWGRGTDVVMTQSPSSLSASVGDRVTITCQASQDISNYLAWYQQKPGRAPTLLIFAASNLQSGVPSRFSGSGSGTEFTLTISGLQPEDFATYYCLQDSSYPPTFGGGTKVDIK

SEQ ID NO: 542 - protein, 224 aa, Artificial Sequence; identical to SEQ ID NO: 541
  illustrative antigen binding domain 12
  Relationship to another sequence: Variation of SEQ ID NO: 188

SEQ ID NO: 543 - protein, 224 aa, Artificial Sequence; identical to SEQ ID NO: 541
  illustrative antigen binding domain 12
  Relationship to another sequence: Variation of SEQ ID NO: 188

SEQ ID NO: 544 - protein, 224 aa, Artificial Sequence; identical to SEQ ID NO: 541
  illustrative antigen binding domain 12
  Relationship to another sequence: Variation of SEQ ID NO: 188

SEQ ID NO: 545 - protein, 224 aa, Artificial Sequence; identical to SEQ ID NO: 541
  illustrative antigen binding domain 12
  Relationship to another sequence: Variation of SEQ ID NO: 188

SEQ ID NO: 546 - protein, 224 aa, Artificial Sequence; identical to SEQ ID NO: 541
  illustrative antigen binding domain 12
  Relationship to another sequence: Variation of SEQ ID NO: 188

SEQ ID NO: 547 - protein, 224 aa, Artificial Sequence; identical to SEQ ID NO: 541
  illustrative antigen binding domain 12
  Relationship to another sequence: Variation of SEQ ID NO: 188

SEQ ID NO: 548 - protein, 224 aa, Artificial Sequence; identical to SEQ ID NO: 541
  illustrative antigen binding domain 12
  Relationship to another sequence: Variation of SEQ ID NO: 188

SEQ ID NO: 549 - protein, 224 aa, Artificial Sequence; identical to SEQ ID NO: 541
  illustrative antigen binding domain 12
  Relationship to another sequence: Variation of SEQ ID NO: 188

SEQ ID NO: 550 - protein, 224 aa, Artificial Sequence; identical to SEQ ID NO: 541
  illustrative antigen binding domain 12
  Relationship to another sequence: Variation of SEQ ID NO: 188

SEQ ID NO: 551 - protein, 224 aa, Artificial Sequence; identical to SEQ ID NO: 541
  illustrative antigen binding domain 12
  Relationship to another sequence: Variation of SEQ ID NO: 188

SEQ ID NO: 552 - protein, 224 aa, Artificial Sequence; identical to SEQ ID NO: 541
  illustrative antigen binding domain 12
  Relationship to another sequence: Variation of SEQ ID NO: 188

SEQ ID NO: 553 - protein, 224 aa, Artificial Sequence; identical to SEQ ID NO: 541
  illustrative antigen binding domain 12
  Relationship to another sequence: Variation of SEQ ID NO: 188

SEQ ID NO: 554 - protein, 224 aa, Artificial Sequence; identical to SEQ ID NO: 541
  illustrative antigen binding domain 12
  Relationship to another sequence: Variation of SEQ ID NO: 188

SEQ ID NO: 555 - protein, 224 aa, Artificial Sequence; identical to SEQ ID NO: 541
  illustrative antigen binding domain 12
  Relationship to another sequence: Variation of SEQ ID NO: 188

SEQ ID NO: 556 - protein, 224 aa, Artificial Sequence; identical to SEQ ID NO: 541
  illustrative antigen binding domain 12
  Relationship to another sequence: Variation of SEQ ID NO: 188

SEQ ID NO: 557 - protein, 224 aa, Artificial Sequence; identical to SEQ ID NO: 541
  illustrative antigen binding domain 12
  Relationship to another sequence: Variation of SEQ ID NO: 188

SEQ ID NO: 558 - protein, 224 aa, Artificial Sequence; identical to SEQ ID NO: 541
  illustrative antigen binding domain 12
  Relationship to another sequence: Variation of SEQ ID NO: 188

SEQ ID NO: 559 - protein, 224 aa, Artificial Sequence; identical to SEQ ID NO: 541
  illustrative antigen binding domain 12
  Relationship to another sequence: Variation of SEQ ID NO: 188

SEQ ID NO: 560 - protein, 224 aa, Artificial Sequence; identical to SEQ ID NO: 541
  illustrative antigen binding domain 12
  Relationship to another sequence: Variation of SEQ ID NO: 188

SEQ ID NO: 561 - protein, 224 aa, Artificial Sequence; identical to SEQ ID NO: 541
  illustrative antigen binding domain 12
  Relationship to another sequence: Variation of SEQ ID NO: 188

SEQ ID NO: 562 - protein, 224 aa, Artificial Sequence; identical to SEQ ID NO: 541
  illustrative antigen binding domain 12
  Relationship to another sequence: Variation of SEQ ID NO: 188

SEQ ID NO: 563 - protein, 224 aa, Artificial Sequence; identical to SEQ ID NO: 541
  illustrative antigen binding domain 12
  Relationship to another sequence: Variation of SEQ ID NO: 188

SEQ ID NO: 564 - protein, 224 aa, Artificial Sequence; identical to SEQ ID NO: 541
  illustrative antigen binding domain 12
  Relationship to another sequence: Variation of SEQ ID NO: 188

SEQ ID NO: 565 - protein, 224 aa, Artificial Sequence; identical to SEQ ID NO: 541
  illustrative antigen binding domain 12
  Relationship to another sequence: Variation of SEQ ID NO: 188

SEQ ID NO: 566 - protein, 224 aa, Artificial Sequence; identical to SEQ ID NO: 541
  illustrative antigen binding domain 12
  Relationship to another sequence: Variation of SEQ ID NO: 188

SEQ ID NO: 567 - protein, 224 aa, Artificial Sequence; identical to SEQ ID NO: 541
  illustrative antigen binding domain 12
  Relationship to another sequence: Variation of SEQ ID NO: 188

SEQ ID NO: 568 - protein, 224 aa, Artificial Sequence; identical to SEQ ID NO: 541
  illustrative antigen binding domain 12
  Relationship to another sequence: Variation of SEQ ID NO: 188

SEQ ID NO: 569 - protein, 224 aa, Artificial Sequence; identical to SEQ ID NO: 541
  illustrative antigen binding domain 12
  Relationship to another sequence: Variation of SEQ ID NO: 188

SEQ ID NO: 570 - protein, 224 aa, Artificial Sequence
  illustrative antigen binding domain 13
  Relationship to another sequence: Variation of SEQ ID NO: 189
QVQLVQSGGGVVQPGGSLRVSCAASGVTLSDYGMHWVRQAPGKGLEWMAFIRNDGSDKYYADSVKGRFTISRDNSKKTVSLQMSSLRAEDTAVYYCAKNGESGPLDYWYFDLWGRGTDVVMTQSPSTLSASVGDRVTITCRASQSISSWLAWYQQKPGRAPTLLIYKASNLQSGVPSRFSGSGSGTEFTLTISSLQPDDFASYYCQQYSNYPLTFGGGTKVDIK

SEQ ID NO: 571 - protein, 224 aa, Artificial Sequence; identical to SEQ ID NO: 570
  illustrative antigen binding domain 13
  Relationship to another sequence: Variation of SEQ ID NO: 189

SEQ ID NO: 572 - protein, 224 aa, Artificial Sequence; identical to SEQ ID NO: 570
  illustrative antigen binding domain 13
  Relationship to another sequence: Variation of SEQ ID NO: 189

SEQ ID NO: 573 - protein, 224 aa, Artificial Sequence; identical to SEQ ID NO: 570
  illustrative antigen binding domain 13
  Relationship to another sequence: Variation of SEQ ID NO: 189

SEQ ID NO: 574 - protein, 224 aa, Artificial Sequence; identical to SEQ ID NO: 570
  illustrative antigen binding domain 13
  Relationship to another sequence: Variation of SEQ ID NO: 189

SEQ ID NO: 575 - protein, 224 aa, Artificial Sequence; identical to SEQ ID NO: 570
  illustrative antigen binding domain 13
  Relationship to another sequence: Variation of SEQ ID NO: 189

SEQ ID NO: 576 - protein, 224 aa, Artificial Sequence; identical to SEQ ID NO: 570
  illustrative antigen binding domain 13
  Relationship to another sequence: Variation of SEQ ID NO: 189

SEQ ID NO: 577 - protein, 224 aa, Artificial Sequence; identical to SEQ ID NO: 570
  illustrative antigen binding domain 13
  Relationship to another sequence: Variation of SEQ ID NO: 189

SEQ ID NO: 578 - protein, 224 aa, Artificial Sequence; identical to SEQ ID NO: 570
  illustrative antigen binding domain 13
  Relationship to another sequence: Variation of SEQ ID NO: 189

SEQ ID NO: 579 - protein, 224 aa, Artificial Sequence; identical to SEQ ID NO: 570
  illustrative antigen binding domain 13
  Relationship to another sequence: Variation of SEQ ID NO: 189

SEQ ID NO: 580 - protein, 224 aa, Artificial Sequence; identical to SEQ ID NO: 570
  illustrative antigen binding domain 13
  Relationship to another sequence: Variation of SEQ ID NO: 189

SEQ ID NO: 581 - protein, 224 aa, Artificial Sequence; identical to SEQ ID NO: 570
  illustrative antigen binding domain 13
  Relationship to another sequence: Variation of SEQ ID NO: 189

SEQ ID NO: 582 - protein, 224 aa, Artificial Sequence; identical to SEQ ID NO: 570
  illustrative antigen binding domain 13
  Relationship to another sequence: Variation of SEQ ID NO: 189

SEQ ID NO: 583 - protein, 224 aa, Artificial Sequence; identical to SEQ ID NO: 570
  illustrative antigen binding domain 13
  Relationship to another sequence: Variation of SEQ ID NO: 189

SEQ ID NO: 584 - protein, 224 aa, Artificial Sequence; identical to SEQ ID NO: 570
  illustrative antigen binding domain 13
  Relationship to another sequence: Variation of SEQ ID NO: 189

SEQ ID NO: 585 - protein, 224 aa, Artificial Sequence; identical to SEQ ID NO: 570
  illustrative antigen binding domain 13
  Relationship to another sequence: Variation of SEQ ID NO: 189

SEQ ID NO: 586 - protein, 224 aa, Artificial Sequence; identical to SEQ ID NO: 570
  illustrative antigen binding domain 13
  Relationship to another sequence: Variation of SEQ ID NO: 189

SEQ ID NO: 587 - protein, 224 aa, Artificial Sequence; identical to SEQ ID NO: 570
  illustrative antigen binding domain 13
  Relationship to another sequence: Variation of SEQ ID NO: 189

SEQ ID NO: 588 - protein, 224 aa, Artificial Sequence; identical to SEQ ID NO: 570
  illustrative antigen binding domain 13
  Relationship to another sequence: Variation of SEQ ID NO: 189

SEQ ID NO: 589 - protein, 224 aa, Artificial Sequence; identical to SEQ ID NO: 570
  illustrative antigen binding domain 13
  Relationship to another sequence: Variation of SEQ ID NO: 189

SEQ ID NO: 590 - protein, 224 aa, Artificial Sequence; identical to SEQ ID NO: 570
  illustrative antigen binding domain 13
  Relationship to another sequence: Variation of SEQ ID NO: 189

SEQ ID NO: 591 - protein, 224 aa, Artificial Sequence; identical to SEQ ID NO: 570
  illustrative antigen binding domain 13
  Relationship to another sequence: Variation of SEQ ID NO: 189

SEQ ID NO: 592 - protein, 224 aa, Artificial Sequence; identical to SEQ ID NO: 570
  illustrative antigen binding domain 13
  Relationship to another sequence: Variation of SEQ ID NO: 189

SEQ ID NO: 593 - protein, 224 aa, Artificial Sequence; identical to SEQ ID NO: 570
  illustrative antigen binding domain 13
  Relationship to another sequence: Variation of SEQ ID NO: 189

SEQ ID NO: 594 - protein, 224 aa, Artificial Sequence; identical to SEQ ID NO: 570
  illustrative antigen binding domain 13
  Relationship to another sequence: Variation of SEQ ID NO: 189

SEQ ID NO: 595 - protein, 224 aa, Artificial Sequence; identical to SEQ ID NO: 570
  illustrative antigen binding domain 13
  Relationship to another sequence: Variation of SEQ ID NO: 189

SEQ ID NO: 596 - protein, 224 aa, Artificial Sequence; identical to SEQ ID NO: 570
  illustrative antigen binding domain 13
  Relationship to another sequence: Variation of SEQ ID NO: 189

SEQ ID NO: 597 - protein, 224 aa, Artificial Sequence; identical to SEQ ID NO: 570
  illustrative antigen binding domain 13
  Relationship to another sequence: Variation of SEQ ID NO: 189

SEQ ID NO: 598 - protein, 224 aa, Artificial Sequence; identical to SEQ ID NO: 570
  illustrative antigen binding domain 13
  Relationship to another sequence: Variation of SEQ ID NO: 189

SEQ ID NO: 599 - protein, 224 aa, Artificial Sequence
  illustrative antigen binding domain 14
  Relationship to another sequence: Variation of SEQ ID NO: 190
QVQLVQSGGGVVQPGGSLRVSCAASGVTLSDYGMHWVRQAPGKGLEWMAFIRNDGSDKYYADSVKGRFTISRDNSKKTVSLQMSSLRAEDTAVYYCAKNGESGPLDYWYFDLWGRGTDVVMTQSPSFLSASVGDRVTITCRASHGISNYFAWYQQKPGKAPKLLIYATSTLQSGVPSRFSGSGSGTEFTLTISGLQPEDFATYYCQQYSSYPLTFGGGTKVDIK

SEQ ID NO: 600 - protein, 224 aa, Artificial Sequence; identical to SEQ ID NO: 599
  illustrative antigen binding domain 14
  Relationship to another sequence: Variation of SEQ ID NO: 190

SEQ ID NO: 601 - protein, 224 aa, Artificial Sequence; identical to SEQ ID NO: 599
  illustrative antigen binding domain 14
  Relationship to another sequence: Variation of SEQ ID NO: 190

SEQ ID NO: 602 - protein, 224 aa, Artificial Sequence; identical to SEQ ID NO: 599
  illustrative antigen binding domain 14
  Relationship to another sequence: Variation of SEQ ID NO: 190

SEQ ID NO: 603 - protein, 224 aa, Artificial Sequence; identical to SEQ ID NO: 599
  illustrative antigen binding domain 14
  Relationship to another sequence: Variation of SEQ ID NO: 190

SEQ ID NO: 604 - protein, 224 aa, Artificial Sequence; identical to SEQ ID NO: 599
  illustrative antigen binding domain 14
  Relationship to another sequence: Variation of SEQ ID NO: 190

SEQ ID NO: 605 - protein, 224 aa, Artificial Sequence; identical to SEQ ID NO: 599
  illustrative antigen binding domain 14
  Relationship to another sequence: Variation of SEQ ID NO: 190

SEQ ID NO: 606 - protein, 224 aa, Artificial Sequence; identical to SEQ ID NO: 599
  illustrative antigen binding domain 14
  Relationship to another sequence: Variation of SEQ ID NO: 190

SEQ ID NO: 607 - protein, 224 aa, Artificial Sequence; identical to SEQ ID NO: 599
  illustrative antigen binding domain 14
  Relationship to another sequence: Variation of SEQ ID NO: 190

SEQ ID NO: 608 - protein, 224 aa, Artificial Sequence; identical to SEQ ID NO: 599
  illustrative antigen binding domain 14
  Relationship to another sequence: Variation of SEQ ID NO: 190

SEQ ID NO: 609 - protein, 224 aa, Artificial Sequence; identical to SEQ ID NO: 599
  illustrative antigen binding domain 14
  Relationship to another sequence: Variation of SEQ ID NO: 190

SEQ ID NO: 610 - protein, 224 aa, Artificial Sequence; identical to SEQ ID NO: 599
  illustrative antigen binding domain 14
  Relationship to another sequence: Variation of SEQ ID NO: 190

SEQ ID NO: 611 - protein, 224 aa, Artificial Sequence; identical to SEQ ID NO: 599
  illustrative antigen binding domain 14
  Relationship to another sequence: Variation of SEQ ID NO: 190

SEQ ID NO: 612 - protein, 224 aa, Artificial Sequence; identical to SEQ ID NO: 599
  illustrative antigen binding domain 14
  Relationship to another sequence: Variation of SEQ ID NO: 190

SEQ ID NO: 613 - protein, 224 aa, Artificial Sequence; identical to SEQ ID NO: 599
  illustrative antigen binding domain 14
  Relationship to another sequence: Variation of SEQ ID NO: 190

SEQ ID NO: 614 - protein, 224 aa, Artificial Sequence; identical to SEQ ID NO: 599
  illustrative antigen binding domain 14
  Relationship to another sequence: Variation of SEQ ID NO: 190

SEQ ID NO: 615 - protein, 224 aa, Artificial Sequence; identical to SEQ ID NO: 599
  illustrative antigen binding domain 14
  Relationship to another sequence: Variation of SEQ ID NO: 190

SEQ ID NO: 616 - protein, 224 aa, Artificial Sequence; identical to SEQ ID NO: 599
  illustrative antigen binding domain 14
  Relationship to another sequence: Variation of SEQ ID NO: 190

SEQ ID NO: 617 - protein, 224 aa, Artificial Sequence; identical to SEQ ID NO: 599
  illustrative antigen binding domain 14
  Relationship to another sequence: Variation of SEQ ID NO: 190

SEQ ID NO: 618 - protein, 224 aa, Artificial Sequence; identical to SEQ ID NO: 599
  illustrative antigen binding domain 14
  Relationship to another sequence: Variation of SEQ ID NO: 190

SEQ ID NO: 619 - protein, 224 aa, Artificial Sequence; identical to SEQ ID NO: 599
  illustrative antigen binding domain 14
  Relationship to another sequence: Variation of SEQ ID NO: 190

SEQ ID NO: 620 - protein, 224 aa, Artificial Sequence; identical to SEQ ID NO: 599
  illustrative antigen binding domain 14
  Relationship to another sequence: Variation of SEQ ID NO: 190

SEQ ID NO: 621 - protein, 224 aa, Artificial Sequence; identical to SEQ ID NO: 599
  illustrative antigen binding domain 14
  Relationship to another sequence: Variation of SEQ ID NO: 190

SEQ ID NO: 622 - protein, 224 aa, Artificial Sequence; identical to SEQ ID NO: 599
  illustrative antigen binding domain 14
  Relationship to another sequence: Variation of SEQ ID NO: 190

SEQ ID NO: 623 - protein, 224 aa, Artificial Sequence; identical to SEQ ID NO: 599
  illustrative antigen binding domain 14
  Relationship to another sequence: Variation of SEQ ID NO: 190

SEQ ID NO: 624 - protein, 224 aa, Artificial Sequence; identical to SEQ ID NO: 599
  illustrative antigen binding domain 14
  Relationship to another sequence: Variation of SEQ ID NO: 190

SEQ ID NO: 625 - protein, 224 aa, Artificial Sequence; identical to SEQ ID NO: 599
  illustrative antigen binding domain 14
  Relationship to another sequence: Variation of SEQ ID NO: 190

SEQ ID NO: 626 - protein, 224 aa, Artificial Sequence; identical to SEQ ID NO: 599
  illustrative antigen binding domain 14
  Relationship to another sequence: Variation of SEQ ID NO: 190

SEQ ID NO: 627 - protein, 224 aa, Artificial Sequence; identical to SEQ ID NO: 599
  illustrative antigen binding domain 14
  Relationship to another sequence: Variation of SEQ ID NO: 190

SEQ ID NO: 628 - protein, 224 aa, Artificial Sequence
  illustrative antigen binding domain 15
  Relationship to another sequence: Variation of SEQ ID NO: 191
QVQLVQSGGGVVQPGGSLRVSCAASGVTLSDYGMHWVRQAPGKGLEWMAFIRNDGSDKYYADSVKGRFTISRDNSKKTVSLQMSSLRAEDTAVYYCAKNGESGPLDYWYFDLWGRGTDVVMTQSPSTLSAYVGDRITITCRASRGISNYLAWYQQKPGKAPKLLIYATSTLQSGVPLRFSGSGSGTEFTLTISGLQPEDFATYYCQQYDSYPPTFGGGTKVDIK

SEQ ID NO: 629 - protein, 224 aa, Artificial Sequence; identical to SEQ ID NO: 628
  illustrative antigen binding domain 15
  Relationship to another sequence: Variation of SEQ ID NO: 191

SEQ ID NO: 630 - protein, 224 aa, Artificial Sequence; identical to SEQ ID NO: 628
  illustrative antigen binding domain 15
  Relationship to another sequence: Variation of SEQ ID NO: 191

SEQ ID NO: 631 - protein, 224 aa, Artificial Sequence; identical to SEQ ID NO: 628
  illustrative antigen binding domain 15
  Relationship to another sequence: Variation of SEQ ID NO: 191

SEQ ID NO: 632 - protein, 224 aa, Artificial Sequence; identical to SEQ ID NO: 628
  illustrative antigen binding domain 15
  Relationship to another sequence: Variation of SEQ ID NO: 191

SEQ ID NO: 633 - protein, 224 aa, Artificial Sequence; identical to SEQ ID NO: 628
  illustrative antigen binding domain 15
  Relationship to another sequence: Variation of SEQ ID NO: 191

SEQ ID NO: 634 - protein, 224 aa, Artificial Sequence; identical to SEQ ID NO: 628
  illustrative antigen binding domain 15
  Relationship to another sequence: Variation of SEQ ID NO: 191

SEQ ID NO: 635 - protein, 224 aa, Artificial Sequence; identical to SEQ ID NO: 628
  illustrative antigen binding domain 15
  Relationship to another sequence: Variation of SEQ ID NO: 191

SEQ ID NO: 636 - protein, 224 aa, Artificial Sequence; identical to SEQ ID NO: 628
  illustrative antigen binding domain 15
  Relationship to another sequence: Variation of SEQ ID NO: 191

SEQ ID NO: 637 - protein, 224 aa, Artificial Sequence; identical to SEQ ID NO: 628
  illustrative antigen binding domain 15
  Relationship to another sequence: Variation of SEQ ID NO: 191

SEQ ID NO: 638 - protein, 224 aa, Artificial Sequence; identical to SEQ ID NO: 628
  illustrative antigen binding domain 15
  Relationship to another sequence: Variation of SEQ ID NO: 191

SEQ ID NO: 639 - protein, 224 aa, Artificial Sequence; identical to SEQ ID NO: 628
  illustrative antigen binding domain 15
  Relationship to another sequence: Variation of SEQ ID NO: 191

SEQ ID NO: 640 - protein, 224 aa, Artificial Sequence; identical to SEQ ID NO: 628
  illustrative antigen binding domain 15
  Relationship to another sequence: Variation of SEQ ID NO: 191

SEQ ID NO: 641 - protein, 224 aa, Artificial Sequence; identical to SEQ ID NO: 628
  illustrative antigen binding domain 15
  Relationship to another sequence: Variation of SEQ ID NO: 191

SEQ ID NO: 642 - protein, 224 aa, Artificial Sequence; identical to SEQ ID NO: 628
  illustrative antigen binding domain 15
  Relationship to another sequence: Variation of SEQ ID NO: 191

SEQ ID NO: 643 - protein, 224 aa, Artificial Sequence; identical to SEQ ID NO: 628
  illustrative antigen binding domain 15
  Relationship to another sequence: Variation of SEQ ID NO: 191

SEQ ID NO: 644 - protein, 224 aa, Artificial Sequence; identical to SEQ ID NO: 628
  illustrative antigen binding domain 15
  Relationship to another sequence: Variation of SEQ ID NO: 191

SEQ ID NO: 645 - protein, 224 aa, Artificial Sequence; identical to SEQ ID NO: 628
  illustrative antigen binding domain 15
  Relationship to another sequence: Variation of SEQ ID NO: 191

SEQ ID NO: 646 - protein, 224 aa, Artificial Sequence; identical to SEQ ID NO: 628
  illustrative antigen binding domain 15
  Relationship to another sequence: Variation of SEQ ID NO: 191

SEQ ID NO: 647 - protein, 224 aa, Artificial Sequence; identical to SEQ ID NO: 628
  illustrative antigen binding domain 15
  Relationship to another sequence: Variation of SEQ ID NO: 191

SEQ ID NO: 648 - protein, 224 aa, Artificial Sequence; identical to SEQ ID NO: 628
  illustrative antigen binding domain 15
  Relationship to another sequence: Variation of SEQ ID NO: 191

SEQ ID NO: 649 - protein, 224 aa, Artificial Sequence; identical to SEQ ID NO: 628
  illustrative antigen binding domain 15
  Relationship to another sequence: Variation of SEQ ID NO: 191

SEQ ID NO: 650 - protein, 224 aa, Artificial Sequence; identical to SEQ ID NO: 628
  illustrative antigen binding domain 15
  Relationship to another sequence: Variation of SEQ ID NO: 191

SEQ ID NO: 651 - protein, 224 aa, Artificial Sequence; identical to SEQ ID NO: 628
  illustrative antigen binding domain 15
  Relationship to another sequence: Variation of SEQ ID NO: 191

SEQ ID NO: 652 - protein, 224 aa, Artificial Sequence; identical to SEQ ID NO: 628
  illustrative antigen binding domain 15
  Relationship to another sequence: Variation of SEQ ID NO: 191

SEQ ID NO: 653 - protein, 224 aa, Artificial Sequence; identical to SEQ ID NO: 628
  illustrative antigen binding domain 15
  Relationship to another sequence: Variation of SEQ ID NO: 191

SEQ ID NO: 654 - protein, 224 aa, Artificial Sequence; identical to SEQ ID NO: 628
  illustrative antigen binding domain 15
  Relationship to another sequence: Variation of SEQ ID NO: 191

SEQ ID NO: 655 - protein, 224 aa, Artificial Sequence; identical to SEQ ID NO: 628
  illustrative antigen binding domain 15
  Relationship to another sequence: Variation of SEQ ID NO: 191

SEQ ID NO: 656 - protein, 224 aa, Artificial Sequence; identical to SEQ ID NO: 628
  illustrative antigen binding domain 15
  Relationship to another sequence: Variation of SEQ ID NO: 191

SEQ ID NO: 657 - protein, 233 aa, Artificial Sequence
  illustrative antigen binding domain 16
  Relationship to another sequence: Variation of SEQ ID NO: 192
EVQLVQSGAEVKKPGSSVKVSCKASGGTFSSYAISWVRQAPGQGLEWMGGIIPIFGTANYAQKFQGRVTITADESTSTAYMELSSLRSEDTAVYYCARGGYDSRGSYYYMDVWGKGTTVTVSSQSVLTQPPSTSGTPGQRVTISCSGSSSNIGGNAVNWYQHFPGTAPTLLIYSNNQRPSGVPERFSGSKSGTSASLTVSGLQAEDEADYYCTAWDDSLRGYLFGTGTKVTVL

SEQ ID NO: 658 - protein, 233 aa, Artificial Sequence; identical to SEQ ID NO: 657
  illustrative antigen binding domain 16
  Relationship to another sequence: Variation of SEQ ID NO: 192

SEQ ID NO: 659 - protein, 233 aa, Artificial Sequence; identical to SEQ ID NO: 657
  illustrative antigen binding domain 16
  Relationship to another sequence: Variation of SEQ ID NO: 192

SEQ ID NO: 660 - protein, 233 aa, Artificial Sequence; identical to SEQ ID NO: 657
  illustrative antigen binding domain 16
  Relationship to another sequence: Variation of SEQ ID NO: 192

SEQ ID NO: 661 - protein, 233 aa, Artificial Sequence; identical to SEQ ID NO: 657
  illustrative antigen binding domain 16
  Relationship to another sequence: Variation of SEQ ID NO: 192

SEQ ID NO: 662 - protein, 233 aa, Artificial Sequence; identical to SEQ ID NO: 657
  illustrative antigen binding domain 16
  Relationship to another sequence: Variation of SEQ ID NO: 192

SEQ ID NO: 663 - protein, 233 aa, Artificial Sequence; identical to SEQ ID NO: 657
  illustrative antigen binding domain 16
  Relationship to another sequence: Variation of SEQ ID NO: 192

SEQ ID NO: 664 - protein, 233 aa, Artificial Sequence; identical to SEQ ID NO: 657
  illustrative antigen binding domain 16
  Relationship to another sequence: Variation of SEQ ID NO: 192

SEQ ID NO: 665 - protein, 233 aa, Artificial Sequence; identical to SEQ ID NO: 657
  illustrative antigen binding domain 16
  Relationship to another sequence: Variation of SEQ ID NO: 192

SEQ ID NO: 666 - protein, 233 aa, Artificial Sequence; identical to SEQ ID NO: 657
  illustrative antigen binding domain 16
  Relationship to another sequence: Variation of SEQ ID NO: 192

SEQ ID NO: 667 - protein, 233 aa, Artificial Sequence; identical to SEQ ID NO: 657
  illustrative antigen binding domain 16
  Relationship to another sequence: Variation of SEQ ID NO: 192

SEQ ID NO: 668 - protein, 233 aa, Artificial Sequence; identical to SEQ ID NO: 657
  illustrative antigen binding domain 16
  Relationship to another sequence: Variation of SEQ ID NO: 192

SEQ ID NO: 669 - protein, 233 aa, Artificial Sequence; identical to SEQ ID NO: 657
  illustrative antigen binding domain 16
  Relationship to another sequence: Variation of SEQ ID NO: 192

SEQ ID NO: 670 - protein, 233 aa, Artificial Sequence; identical to SEQ ID NO: 657
  illustrative antigen binding domain 16
  Relationship to another sequence: Variation of SEQ ID NO: 192

SEQ ID NO: 671 - protein, 233 aa, Artificial Sequence; identical to SEQ ID NO: 657
  illustrative antigen binding domain 16
  Relationship to another sequence: Variation of SEQ ID NO: 192

SEQ ID NO: 672 - protein, 233 aa, Artificial Sequence; identical to SEQ ID NO: 657
  illustrative antigen binding domain 16
  Relationship to another sequence: Variation of SEQ ID NO: 192

SEQ ID NO: 673 - protein, 233 aa, Artificial Sequence; identical to SEQ ID NO: 657
  illustrative antigen binding domain 16
  Relationship to another sequence: Variation of SEQ ID NO: 192

SEQ ID NO: 674 - protein, 233 aa, Artificial Sequence; identical to SEQ ID NO: 657
  illustrative antigen binding domain 16
  Relationship to another sequence: Variation of SEQ ID NO: 192

SEQ ID NO: 675 - protein, 233 aa, Artificial Sequence; identical to SEQ ID NO: 657
  illustrative antigen binding domain 16
  Relationship to another sequence: Variation of SEQ ID NO: 192

SEQ ID NO: 676 - protein, 233 aa, Artificial Sequence; identical to SEQ ID NO: 657
  illustrative antigen binding domain 16
  Relationship to another sequence: Variation of SEQ ID NO: 192

SEQ ID NO: 677 - protein, 233 aa, Artificial Sequence; identical to SEQ ID NO: 657
  illustrative antigen binding domain 16
  Relationship to another sequence: Variation of SEQ ID NO: 192

SEQ ID NO: 678 - protein, 233 aa, Artificial Sequence; identical to SEQ ID NO: 657
  illustrative antigen binding domain 16
  Relationship to another sequence: Variation of SEQ ID NO: 192

SEQ ID NO: 679 - protein, 233 aa, Artificial Sequence; identical to SEQ ID NO: 657
  illustrative antigen binding domain 16
  Relationship to another sequence: Variation of SEQ ID NO: 192

SEQ ID NO: 680 - protein, 233 aa, Artificial Sequence; identical to SEQ ID NO: 657
  illustrative antigen binding domain 16
  Relationship to another sequence: Variation of SEQ ID NO: 192

SEQ ID NO: 681 - protein, 233 aa, Artificial Sequence; identical to SEQ ID NO: 657
  illustrative antigen binding domain 16
  Relationship to another sequence: Variation of SEQ ID NO: 192

SEQ ID NO: 682 - protein, 233 aa, Artificial Sequence; identical to SEQ ID NO: 657
  illustrative antigen binding domain 16
  Relationship to another sequence: Variation of SEQ ID NO: 192

SEQ ID NO: 683 - protein, 233 aa, Artificial Sequence; identical to SEQ ID NO: 657
  illustrative antigen binding domain 16
  Relationship to another sequence: Variation of SEQ ID NO: 192

SEQ ID NO: 684 - protein, 233 aa, Artificial Sequence; identical to SEQ ID NO: 657
  illustrative antigen binding domain 16
  Relationship to another sequence: Variation of SEQ ID NO: 192

SEQ ID NO: 685 - protein, 233 aa, Artificial Sequence; identical to SEQ ID NO: 657
  illustrative antigen binding domain 16
  Relationship to another sequence: Variation of SEQ ID NO: 192

SEQ ID NO: 686 - protein, 231 aa, Artificial Sequence
  illustrative antigen binding domain 17
  Relationship to another sequence: Variation of SEQ ID NO: 193
QVQLVESGGGVVQPGRSLRLSCAASGFTFSSYAMHWVRQAPGKGLEWVAVISYDGSNKYYADSVKGRFTISRDNSKNTLYLQMNSLRAEDTAVYYCARDREELLALFGGMDVWGQGTTVTVSSQPVLTQPSSVSVAPGQTARITCGGNNIGSKSVHWYQQKPGQAPVLVVYDDSDRPSGIPERFSGSNSGNTATLTISRVEARDEADYYCHVWDAKTNHQVFGGGTRLTVQ

SEQ ID NO: 687 - protein, 231 aa, Artificial Sequence; identical to SEQ ID NO: 686
  illustrative antigen binding domain 17
  Relationship to another sequence: Variation of SEQ ID NO: 193

SEQ ID NO: 688 - protein, 231 aa, Artificial Sequence; identical to SEQ ID NO: 686
  illustrative antigen binding domain 17
  Relationship to another sequence: Variation of SEQ ID NO: 193

SEQ ID NO: 689 - protein, 231 aa, Artificial Sequence; identical to SEQ ID NO: 686
  illustrative antigen binding domain 17
  Relationship to another sequence: Variation of SEQ ID NO: 193

SEQ ID NO: 690 - protein, 231 aa, Artificial Sequence; identical to SEQ ID NO: 686
  illustrative antigen binding domain 17
  Relationship to another sequence: Variation of SEQ ID NO: 193

SEQ ID NO: 691 - protein, 231 aa, Artificial Sequence; identical to SEQ ID NO: 686
  illustrative antigen binding domain 17
  Relationship to another sequence: Variation of SEQ ID NO: 193

SEQ ID NO: 692 - protein, 231 aa, Artificial Sequence; identical to SEQ ID NO: 686
  illustrative antigen binding domain 17
  Relationship to another sequence: Variation of SEQ ID NO: 193

SEQ ID NO: 693 - protein, 231 aa, Artificial Sequence; identical to SEQ ID NO: 686
  illustrative antigen binding domain 17
  Relationship to another sequence: Variation of SEQ ID NO: 193

SEQ ID NO: 694 - protein, 231 aa, Artificial Sequence; identical to SEQ ID NO: 686
  illustrative antigen binding domain 17
  Relationship to another sequence: Variation of SEQ ID NO: 193

SEQ ID NO: 695 - protein, 231 aa, Artificial Sequence; identical to SEQ ID NO: 686
  illustrative antigen binding domain 17
  Relationship to another sequence: Variation of SEQ ID NO: 193

SEQ ID NO: 696 - protein, 231 aa, Artificial Sequence; identical to SEQ ID NO: 686
  illustrative antigen binding domain 17
  Relationship to another sequence: Variation of SEQ ID NO: 193

SEQ ID NO: 697 - protein, 231 aa, Artificial Sequence; identical to SEQ ID NO: 686
  illustrative antigen binding domain 17
  Relationship to another sequence: Variation of SEQ ID NO: 193

SEQ ID NO: 698 - protein, 231 aa, Artificial Sequence; identical to SEQ ID NO: 686
  illustrative antigen binding domain 17
  Relationship to another sequence: Variation of SEQ ID NO: 193

SEQ ID NO: 699 - protein, 231 aa, Artificial Sequence; identical to SEQ ID NO: 686
  illustrative antigen binding domain 17
  Relationship to another sequence: Variation of SEQ ID NO: 193

SEQ ID NO: 700 - protein, 231 aa, Artificial Sequence; identical to SEQ ID NO: 686
  illustrative antigen binding domain 17
  Relationship to another sequence: Variation of SEQ ID NO: 193

SEQ ID NO: 701 - protein, 231 aa, Artificial Sequence; identical to SEQ ID NO: 686
  illustrative antigen binding domain 17
  Relationship to another sequence: Variation of SEQ ID NO: 193

SEQ ID NO: 702 - protein, 231 aa, Artificial Sequence; identical to SEQ ID NO: 686
  illustrative antigen binding domain 17
  Relationship to another sequence: Variation of SEQ ID NO: 193

SEQ ID NO: 703 - protein, 231 aa, Artificial Sequence; identical to SEQ ID NO: 686
  illustrative antigen binding domain 17
  Relationship to another sequence: Variation of SEQ ID NO: 193

SEQ ID NO: 704 - protein, 231 aa, Artificial Sequence; identical to SEQ ID NO: 686
  illustrative antigen binding domain 17
  Relationship to another sequence: Variation of SEQ ID NO: 193

SEQ ID NO: 705 - protein, 231 aa, Artificial Sequence; identical to SEQ ID NO: 686
  illustrative antigen binding domain 17
  Relationship to another sequence: Variation of SEQ ID NO: 193

SEQ ID NO: 706 - protein, 231 aa, Artificial Sequence; identical to SEQ ID NO: 686
  illustrative antigen binding domain 17
  Relationship to another sequence: Variation of SEQ ID NO: 193

SEQ ID NO: 707 - protein, 231 aa, Artificial Sequence; identical to SEQ ID NO: 686
  illustrative antigen binding domain 17
  Relationship to another sequence: Variation of SEQ ID NO: 193

SEQ ID NO: 708 - protein, 231 aa, Artificial Sequence; identical to SEQ ID NO: 686
  illustrative antigen binding domain 17
  Relationship to another sequence: Variation of SEQ ID NO: 193

SEQ ID NO: 709 - protein, 231 aa, Artificial Sequence; identical to SEQ ID NO: 686
  illustrative antigen binding domain 17
  Relationship to another sequence: Variation of SEQ ID NO: 193

SEQ ID NO: 710 - protein, 231 aa, Artificial Sequence; identical to SEQ ID NO: 686
  illustrative antigen binding domain 17
  Relationship to another sequence: Variation of SEQ ID NO: 193

SEQ ID NO: 711 - protein, 231 aa, Artificial Sequence; identical to SEQ ID NO: 686
  illustrative antigen binding domain 17
  Relationship to another sequence: Variation of SEQ ID NO: 193

SEQ ID NO: 712 - protein, 231 aa, Artificial Sequence; identical to SEQ ID NO: 686
  illustrative antigen binding domain 17
  Relationship to another sequence: Variation of SEQ ID NO: 193

SEQ ID NO: 713 - protein, 231 aa, Artificial Sequence; identical to SEQ ID NO: 686
  illustrative antigen binding domain 17
  Relationship to another sequence: Variation of SEQ ID NO: 193

SEQ ID NO: 714 - protein, 231 aa, Artificial Sequence; identical to SEQ ID NO: 686
  illustrative antigen binding domain 17
  Relationship to another sequence: Variation of SEQ ID NO: 193

SEQ ID NO: 715 - protein, 343 aa, Artificial Sequence
  illustrative antigen binding domain 18
  Relationship to another sequence: Variation of SEQ ID NO: 194
EVQLVQSGAEVKKPGSSVKVSCKASGGTFSSYAISWVRQAPGQGLEWMGGIIPIFGTANYAQKFQGRVTITADKSTSTAYMELSSLRSEDTAVYYCARPQSRWLQSGDAFDIWGQGTMVTVSSQPVLTQPRSVSGSPGQSVTISCTGTSSDVGGYNRVSWYQQTPGTAPKLMIYEVSNRPSGVSNRFSGSKSGNTASLTISGLQAEDEADYYCSSYTSSSTVVFGGGTKLTVLQPVLTQPRSVSGSPGQSVTISCTGTSSDVGGYNRVSWYQQTPGTAPKLMIYEVSNRPSGVSNRFSGSKSGNTASLTISGLQAEDEADYYCSSYTSSSTVVFGGGTKLTVL

SEQ ID NO: 716 - protein, 233 aa, Artificial Sequence
  illustrative antigen binding domain 18
  Relationship to another sequence: Variation of SEQ ID NO: 194
EVQLVQSGAEVKKPGSSVKVSCKASGGTFSSYAISWVRQAPGQGLEWMGGIIPIFGTANYAQKFQGRVTITADKSTSTAYMELSSLRSEDTAVYYCARPQSRWLQSGDAFDIWGQGTMVTVSSQPVLTQPRSVSGSPGQSVTISCTGTSSDVGGYNRVSWYQQTPGTAPKLMIYEVSNRPSGVSNRFSGSKSGNTASLTISGLQAEDEADYYCSSYTSSSTVVFGGGTKLTVL

SEQ ID NO: 717 - protein, 233 aa, Artificial Sequence; identical to SEQ ID NO: 716
  illustrative antigen binding domain 18
  Relationship to another sequence: Variation of SEQ ID NO: 194

SEQ ID NO: 718 - protein, 233 aa, Artificial Sequence; identical to SEQ ID NO: 716
  illustrative antigen binding domain 18
  Relationship to another sequence: Variation of SEQ ID NO: 194

SEQ ID NO: 719 - protein, 233 aa, Artificial Sequence; identical to SEQ ID NO: 716
  illustrative antigen binding domain 18
  Relationship to another sequence: Variation of SEQ ID NO: 194

SEQ ID NO: 720 - protein, 233 aa, Artificial Sequence; identical to SEQ ID NO: 716
  illustrative antigen binding domain 18
  Relationship to another sequence: Variation of SEQ ID NO: 194

SEQ ID NO: 721 - protein, 233 aa, Artificial Sequence; identical to SEQ ID NO: 716
  illustrative antigen binding domain 18
  Relationship to another sequence: Variation of SEQ ID NO: 194

SEQ ID NO: 722 - protein, 233 aa, Artificial Sequence; identical to SEQ ID NO: 716
  illustrative antigen binding domain 18
  Relationship to another sequence: Variation of SEQ ID NO: 194

SEQ ID NO: 723 - protein, 233 aa, Artificial Sequence; identical to SEQ ID NO: 716
  illustrative antigen binding domain 18
  Relationship to another sequence: Variation of SEQ ID NO: 194

SEQ ID NO: 724 - protein, 233 aa, Artificial Sequence; identical to SEQ ID NO: 716
  illustrative antigen binding domain 18
  Relationship to another sequence: Variation of SEQ ID NO: 194

SEQ ID NO: 725 - protein, 233 aa, Artificial Sequence; identical to SEQ ID NO: 716
  illustrative antigen binding domain 18
  Relationship to another sequence: Variation of SEQ ID NO: 194

SEQ ID NO: 726 - protein, 233 aa, Artificial Sequence; identical to SEQ ID NO: 716
  illustrative antigen binding domain 18
  Relationship to another sequence: Variation of SEQ ID NO: 194

SEQ ID NO: 727 - protein, 233 aa, Artificial Sequence; identical to SEQ ID NO: 716
  illustrative antigen binding domain 18
  Relationship to another sequence: Variation of SEQ ID NO: 194

SEQ ID NO: 728 - protein, 233 aa, Artificial Sequence; identical to SEQ ID NO: 716
  illustrative antigen binding domain 18
  Relationship to another sequence: Variation of SEQ ID NO: 194

SEQ ID NO: 729 - protein, 233 aa, Artificial Sequence; identical to SEQ ID NO: 716
  illustrative antigen binding domain 18
  Relationship to another sequence: Variation of SEQ ID NO: 194

SEQ ID NO: 730 - protein, 233 aa, Artificial Sequence; identical to SEQ ID NO: 716
  illustrative antigen binding domain 18
  Relationship to another sequence: Variation of SEQ ID NO: 194

SEQ ID NO: 731 - protein, 233 aa, Artificial Sequence; identical to SEQ ID NO: 716
  illustrative antigen binding domain 18
  Relationship to another sequence: Variation of SEQ ID NO: 194

SEQ ID NO: 732 - protein, 233 aa, Artificial Sequence; identical to SEQ ID NO: 716
  illustrative antigen binding domain 18
  Relationship to another sequence: Variation of SEQ ID NO: 194

SEQ ID NO: 733 - protein, 233 aa, Artificial Sequence; identical to SEQ ID NO: 716
  illustrative antigen binding domain 18
  Relationship to another sequence: Variation of SEQ ID NO: 194

SEQ ID NO: 734 - protein, 233 aa, Artificial Sequence; identical to SEQ ID NO: 716
  illustrative antigen binding domain 18
  Relationship to another sequence: Variation of SEQ ID NO: 194

SEQ ID NO: 735 - protein, 233 aa, Artificial Sequence; identical to SEQ ID NO: 716
  illustrative antigen binding domain 18
  Relationship to another sequence: Variation of SEQ ID NO: 194

SEQ ID NO: 736 - protein, 233 aa, Artificial Sequence; identical to SEQ ID NO: 716
  illustrative antigen binding domain 18
  Relationship to another sequence: Variation of SEQ ID NO: 194

SEQ ID NO: 737 - protein, 233 aa, Artificial Sequence; identical to SEQ ID NO: 716
  illustrative antigen binding domain 18
  Relationship to another sequence: Variation of SEQ ID NO: 194

SEQ ID NO: 738 - protein, 233 aa, Artificial Sequence; identical to SEQ ID NO: 716
  illustrative antigen binding domain 18
  Relationship to another sequence: Variation of SEQ ID NO: 194

SEQ ID NO: 739 - protein, 233 aa, Artificial Sequence; identical to SEQ ID NO: 716
  illustrative antigen binding domain 18
  Relationship to another sequence: Variation of SEQ ID NO: 194

SEQ ID NO: 740 - protein, 233 aa, Artificial Sequence; identical to SEQ ID NO: 716
  illustrative antigen binding domain 18
  Relationship to another sequence: Variation of SEQ ID NO: 194

SEQ ID NO: 741 - protein, 233 aa, Artificial Sequence; identical to SEQ ID NO: 716
  illustrative antigen binding domain 18
  Relationship to another sequence: Variation of SEQ ID NO: 194

SEQ ID NO: 742 - protein, 233 aa, Artificial Sequence; identical to SEQ ID NO: 716
  illustrative antigen binding domain 18
  Relationship to another sequence: Variation of SEQ ID NO: 194

SEQ ID NO: 743 - protein, 233 aa, Artificial Sequence; identical to SEQ ID NO: 716
  illustrative antigen binding domain 18
  Relationship to another sequence: Variation of SEQ ID NO: 194

SEQ ID NO: 744 - protein, 228 aa, Artificial Sequence
  illustrative antigen binding domain 19
  Relationship to another sequence: Variation of SEQ ID NO: 195
QVQLQQSGAEVKKPGASVKVSCKASGYTFTSYAMHWVRQAPGQRLEWMGRINAGNGNTKYSQKFQGRVTITRDTSASTAYMELSSLRSEDTAVYYCARDLTGTLLFDYWGQGTLVTVSSQSVLTQPPSASGTPGQRVTISCSGSSSNIGSNGVKWYQQLPGTAPKLVIYRDYQRPSGVPDRFSGSKSGTSASLAISGLQSEDEAKYYCAAWDDSLNVVFGGGTQLTVL

SEQ ID NO: 745 - protein, 228 aa, Artificial Sequence; identical to SEQ ID NO: 744
  illustrative antigen binding domain 19
  Relationship to another sequence: Variation of SEQ ID NO: 195

SEQ ID NO: 746 - protein, 228 aa, Artificial Sequence; identical to SEQ ID NO: 744
  illustrative antigen binding domain 19
  Relationship to another sequence: Variation of SEQ ID NO: 195

SEQ ID NO: 747 - protein, 228 aa, Artificial Sequence; identical to SEQ ID NO: 744
  illustrative antigen binding domain 19
  Relationship to another sequence: Variation of SEQ ID NO: 195

SEQ ID NO: 748 - protein, 228 aa, Artificial Sequence; identical to SEQ ID NO: 744
  illustrative antigen binding domain 19
  Relationship to another sequence: Variation of SEQ ID NO: 195

SEQ ID NO: 749 - protein, 228 aa, Artificial Sequence; identical to SEQ ID NO: 744
  illustrative antigen binding domain 19
  Relationship to another sequence: Variation of SEQ ID NO: 195

SEQ ID NO: 750 - protein, 228 aa, Artificial Sequence; identical to SEQ ID NO: 744
  illustrative antigen binding domain 19
  Relationship to another sequence: Variation of SEQ ID NO: 195

SEQ ID NO: 751 - protein, 228 aa, Artificial Sequence; identical to SEQ ID NO: 744
  illustrative antigen binding domain 19
  Relationship to another sequence: Variation of SEQ ID NO: 195

SEQ ID NO: 752 - protein, 228 aa, Artificial Sequence; identical to SEQ ID NO: 744
  illustrative antigen binding domain 19
  Relationship to another sequence: Variation of SEQ ID NO: 195

SEQ ID NO: 753 - protein, 228 aa, Artificial Sequence; identical to SEQ ID NO: 744
  illustrative antigen binding domain 19
  Relationship to another sequence: Variation of SEQ ID NO: 195

SEQ ID NO: 754 - protein, 228 aa, Artificial Sequence; identical to SEQ ID NO: 744
  illustrative antigen binding domain 19
  Relationship to another sequence: Variation of SEQ ID NO: 195

SEQ ID NO: 755 - protein, 228 aa, Artificial Sequence; identical to SEQ ID NO: 744
  illustrative antigen binding domain 19
  Relationship to another sequence: Variation of SEQ ID NO: 195

SEQ ID NO: 756 - protein, 228 aa, Artificial Sequence; identical to SEQ ID NO: 744
  illustrative antigen binding domain 19
  Relationship to another sequence: Variation of SEQ ID NO: 195

SEQ ID NO: 757 - protein, 228 aa, Artificial Sequence; identical to SEQ ID NO: 744
  illustrative antigen binding domain 19
  Relationship to another sequence: Variation of SEQ ID NO: 195

SEQ ID NO: 758 - protein, 228 aa, Artificial Sequence; identical to SEQ ID NO: 744
  illustrative antigen binding domain 19
  Relationship to another sequence: Variation of SEQ ID NO: 195

SEQ ID NO: 759 - protein, 228 aa, Artificial Sequence; identical to SEQ ID NO: 744
  illustrative antigen binding domain 19
  Relationship to another sequence: Variation of SEQ ID NO: 195

SEQ ID NO: 760 - protein, 228 aa, Artificial Sequence; identical to SEQ ID NO: 744
  illustrative antigen binding domain 19
  Relationship to another sequence: Variation of SEQ ID NO: 195

SEQ ID NO: 761 - protein, 228 aa, Artificial Sequence; identical to SEQ ID NO: 744
  illustrative antigen binding domain 19
  Relationship to another sequence: Variation of SEQ ID NO: 195

SEQ ID NO: 762 - protein, 228 aa, Artificial Sequence; identical to SEQ ID NO: 744
  illustrative antigen binding domain 19
  Relationship to another sequence: Variation of SEQ ID NO: 195

SEQ ID NO: 763 - protein, 228 aa, Artificial Sequence; identical to SEQ ID NO: 744
  illustrative antigen binding domain 19
  Relationship to another sequence: Variation of SEQ ID NO: 195

SEQ ID NO: 764 - protein, 228 aa, Artificial Sequence; identical to SEQ ID NO: 744
  illustrative antigen binding domain 19
  Relationship to another sequence: Variation of SEQ ID NO: 195

SEQ ID NO: 765 - protein, 228 aa, Artificial Sequence; identical to SEQ ID NO: 744
  illustrative antigen binding domain 19
  Relationship to another sequence: Variation of SEQ ID NO: 195

SEQ ID NO: 766 - protein, 228 aa, Artificial Sequence; identical to SEQ ID NO: 744
  illustrative antigen binding domain 19
  Relationship to another sequence: Variation of SEQ ID NO: 195

SEQ ID NO: 767 - protein, 228 aa, Artificial Sequence; identical to SEQ ID NO: 744
  illustrative antigen binding domain 19
  Relationship to another sequence: Variation of SEQ ID NO: 195

SEQ ID NO: 768 - protein, 228 aa, Artificial Sequence; identical to SEQ ID NO: 744
  illustrative antigen binding domain 19
  Relationship to another sequence: Variation of SEQ ID NO: 195

SEQ ID NO: 769 - protein, 228 aa, Artificial Sequence; identical to SEQ ID NO: 744
  illustrative antigen binding domain 19
  Relationship to another sequence: Variation of SEQ ID NO: 195

SEQ ID NO: 770 - protein, 228 aa, Artificial Sequence; identical to SEQ ID NO: 744
  illustrative antigen binding domain 19
  Relationship to another sequence: Variation of SEQ ID NO: 195

SEQ ID NO: 771 - protein, 228 aa, Artificial Sequence; identical to SEQ ID NO: 744
  illustrative antigen binding domain 19
  Relationship to another sequence: Variation of SEQ ID NO: 195

SEQ ID NO: 772 - protein, 228 aa, Artificial Sequence; identical to SEQ ID NO: 744
  illustrative antigen binding domain 19
  Relationship to another sequence: Variation of SEQ ID NO: 195

SEQ ID NO: 773 - protein, 233 aa, Artificial Sequence
  illustrative antigen binding domain 20
  Relationship to another sequence: Variation of SEQ ID NO: 196
QVQLVQSGAEVKKPGSSVKVSCKASGGTFSSYAISWVRQAPGQGLEWMGGIIPIFGTANYAQKFQGRATITADESTSTAYMELSSLRSEDTAVYYCARRAERWLHLSGAFDIWGQGTMVTVSSQPVLTQSSSASGTPGQRVAISCSGSSSNVGSNTVNWYQQSPGTAPKLLISSNHQRPSGVPDRFSGSKFGTSASLAISGLQSEDEADYYCGAWDDSLNGYVFGSGTKVTVL

SEQ ID NO: 774 - protein, 233 aa, Artificial Sequence; identical to SEQ ID NO: 773
  illustrative antigen binding domain 20
  Relationship to another sequence: Variation of SEQ ID NO: 196

SEQ ID NO: 775 - protein, 233 aa, Artificial Sequence; identical to SEQ ID NO: 773
  illustrative antigen binding domain 20
  Relationship to another sequence: Variation of SEQ ID NO: 196

SEQ ID NO: 776 - protein, 233 aa, Artificial Sequence; identical to SEQ ID NO: 773
  illustrative antigen binding domain 20
  Relationship to another sequence: Variation of SEQ ID NO: 196

SEQ ID NO: 777 - protein, 233 aa, Artificial Sequence; identical to SEQ ID NO: 773
  illustrative antigen binding domain 20
  Relationship to another sequence: Variation of SEQ ID NO: 196

SEQ ID NO: 778 - protein, 233 aa, Artificial Sequence; identical to SEQ ID NO: 773
  illustrative antigen binding domain 20
  Relationship to another sequence: Variation of SEQ ID NO: 196

SEQ ID NO: 779 - protein, 233 aa, Artificial Sequence; identical to SEQ ID NO: 773
  illustrative antigen binding domain 20
  Relationship to another sequence: Variation of SEQ ID NO: 196

SEQ ID NO: 780 - protein, 233 aa, Artificial Sequence; identical to SEQ ID NO: 773
  illustrative antigen binding domain 20
  Relationship to another sequence: Variation of SEQ ID NO: 196

SEQ ID NO: 781 - protein, 233 aa, Artificial Sequence; identical to SEQ ID NO: 773
  illustrative antigen binding domain 20
  Relationship to another sequence: Variation of SEQ ID NO: 196

SEQ ID NO: 782 - protein, 233 aa, Artificial Sequence; identical to SEQ ID NO: 773
  illustrative antigen binding domain 20
  Relationship to another sequence: Variation of SEQ ID NO: 196

SEQ ID NO: 783 - protein, 233 aa, Artificial Sequence; identical to SEQ ID NO: 773
  illustrative antigen binding domain 20
  Relationship to another sequence: Variation of SEQ ID NO: 196

SEQ ID NO: 784 - protein, 233 aa, Artificial Sequence; identical to SEQ ID NO: 773
  illustrative antigen binding domain 20
  Relationship to another sequence: Variation of SEQ ID NO: 196

SEQ ID NO: 785 - protein, 233 aa, Artificial Sequence; identical to SEQ ID NO: 773
  illustrative antigen binding domain 20
  Relationship to another sequence: Variation of SEQ ID NO: 196

SEQ ID NO: 786 - protein, 233 aa, Artificial Sequence; identical to SEQ ID NO: 773
  illustrative antigen binding domain 20
  Relationship to another sequence: Variation of SEQ ID NO: 196

SEQ ID NO: 787 - protein, 233 aa, Artificial Sequence; identical to SEQ ID NO: 773
  illustrative antigen binding domain 20
  Relationship to another sequence: Variation of SEQ ID NO: 196

SEQ ID NO: 788 - protein, 233 aa, Artificial Sequence; identical to SEQ ID NO: 773
  illustrative antigen binding domain 20
  Relationship to another sequence: Variation of SEQ ID NO: 196

SEQ ID NO: 789 - protein, 233 aa, Artificial Sequence; identical to SEQ ID NO: 773
  illustrative antigen binding domain 20
  Relationship to another sequence: Variation of SEQ ID NO: 196

SEQ ID NO: 790 - protein, 233 aa, Artificial Sequence; identical to SEQ ID NO: 773
  illustrative antigen binding domain 20
  Relationship to another sequence: Variation of SEQ ID NO: 196

SEQ ID NO: 791 - protein, 233 aa, Artificial Sequence; identical to SEQ ID NO: 773
  illustrative antigen binding domain 20
  Relationship to another sequence: Variation of SEQ ID NO: 196

SEQ ID NO: 792 - protein, 233 aa, Artificial Sequence; identical to SEQ ID NO: 773
  illustrative antigen binding domain 20
  Relationship to another sequence: Variation of SEQ ID NO: 196

SEQ ID NO: 793 - protein, 233 aa, Artificial Sequence; identical to SEQ ID NO: 773
  illustrative antigen binding domain 20
  Relationship to another sequence: Variation of SEQ ID NO: 196

SEQ ID NO: 794 - protein, 233 aa, Artificial Sequence; identical to SEQ ID NO: 773
  illustrative antigen binding domain 20
  Relationship to another sequence: Variation of SEQ ID NO: 196

SEQ ID NO: 795 - protein, 233 aa, Artificial Sequence; identical to SEQ ID NO: 773
  illustrative antigen binding domain 20
  Relationship to another sequence: Variation of SEQ ID NO: 196

SEQ ID NO: 796 - protein, 233 aa, Artificial Sequence; identical to SEQ ID NO: 773
  illustrative antigen binding domain 20
  Relationship to another sequence: Variation of SEQ ID NO: 196

SEQ ID NO: 797 - protein, 233 aa, Artificial Sequence; identical to SEQ ID NO: 773
  illustrative antigen binding domain 20
  Relationship to another sequence: Variation of SEQ ID NO: 196

SEQ ID NO: 798 - protein, 233 aa, Artificial Sequence; identical to SEQ ID NO: 773
  illustrative antigen binding domain 20
  Relationship to another sequence: Variation of SEQ ID NO: 196

SEQ ID NO: 799 - protein, 233 aa, Artificial Sequence; identical to SEQ ID NO: 773
  illustrative antigen binding domain 20
  Relationship to another sequence: Variation of SEQ ID NO: 196

SEQ ID NO: 800 - protein, 233 aa, Artificial Sequence; identical to SEQ ID NO: 773
  illustrative antigen binding domain 20
  Relationship to another sequence: Variation of SEQ ID NO: 196

SEQ ID NO: 801 - protein, 233 aa, Artificial Sequence; identical to SEQ ID NO: 773
  illustrative antigen binding domain 20
  Relationship to another sequence: Variation of SEQ ID NO: 196

SEQ ID NO: 802 - protein, 226 aa, Artificial Sequence
  illustrative antigen binding domain 21
  Relationship to another sequence: Variation of SEQ ID NO: 197
QVQLVQSGGGLVQPGGSLRLSCAASGFTFSSYAMSWVRQAPGKGLEWVSAISGSGGSTYYADSVKGRFTMSRDNAKNSLYLQMNSLRVEDSAVYYCATGHYGDYVWGQGALVTVSSQAGLTQPPSASGTPGQRVTISCSGSSSNIGSNTVNWYQQLPGTAPKLLIYSNNQRPSGVPDRFSGSKSGTSASLAISGLQSEDEADYYCAAWDDSLNGPVFGGGTKLTVL

SEQ ID NO: 803 - protein, 226 aa, Artificial Sequence; identical to SEQ ID NO: 802
  illustrative antigen binding domain 21
  Relationship to another sequence: Variation of SEQ ID NO: 197

SEQ ID NO: 804 - protein, 226 aa, Artificial Sequence; identical to SEQ ID NO: 802
  illustrative antigen binding domain 21
  Relationship to another sequence: Variation of SEQ ID NO: 197

SEQ ID NO: 805 - protein, 226 aa, Artificial Sequence; identical to SEQ ID NO: 802
  illustrative antigen binding domain 21
  Relationship to another sequence: Variation of SEQ ID NO: 197

SEQ ID NO: 806 - protein, 226 aa, Artificial Sequence; identical to SEQ ID NO: 802
  illustrative antigen binding domain 21
  Relationship to another sequence: Variation of SEQ ID NO: 197

SEQ ID NO: 807 - protein, 226 aa, Artificial Sequence; identical to SEQ ID NO: 802
  illustrative antigen binding domain 21
  Relationship to another sequence: Variation of SEQ ID NO: 197

SEQ ID NO: 808 - protein, 226 aa, Artificial Sequence; identical to SEQ ID NO: 802
  illustrative antigen binding domain 21
  Relationship to another sequence: Variation of SEQ ID NO: 197

SEQ ID NO: 809 - protein, 226 aa, Artificial Sequence; identical to SEQ ID NO: 802
  illustrative antigen binding domain 21
  Relationship to another sequence: Variation of SEQ ID NO: 197

SEQ ID NO: 810 - protein, 226 aa, Artificial Sequence; identical to SEQ ID NO: 802
  illustrative antigen binding domain 21
  Relationship to another sequence: Variation of SEQ ID NO: 197

SEQ ID NO: 811 - protein, 226 aa, Artificial Sequence; identical to SEQ ID NO: 802
  illustrative antigen binding domain 21
  Relationship to another sequence: Variation of SEQ ID NO: 197

SEQ ID NO: 812 - protein, 226 aa, Artificial Sequence; identical to SEQ ID NO: 802
  illustrative antigen binding domain 21
  Relationship to another sequence: Variation of SEQ ID NO: 197

SEQ ID NO: 813 - protein, 226 aa, Artificial Sequence; identical to SEQ ID NO: 802
  illustrative antigen binding domain 21
  Relationship to another sequence: Variation of SEQ ID NO: 197

SEQ ID NO: 814 - protein, 226 aa, Artificial Sequence; identical to SEQ ID NO: 802
  illustrative antigen binding domain 21
  Relationship to another sequence: Variation of SEQ ID NO: 197

SEQ ID NO: 815 - protein, 226 aa, Artificial Sequence; identical to SEQ ID NO: 802
  illustrative antigen binding domain 21
  Relationship to another sequence: Variation of SEQ ID NO: 197

SEQ ID NO: 816 - protein, 226 aa, Artificial Sequence; identical to SEQ ID NO: 802
  illustrative antigen binding domain 21
  Relationship to another sequence: Variation of SEQ ID NO: 197

SEQ ID NO: 817 - protein, 226 aa, Artificial Sequence; identical to SEQ ID NO: 802
  illustrative antigen binding domain 21
  Relationship to another sequence: Variation of SEQ ID NO: 197

SEQ ID NO: 818 - protein, 226 aa, Artificial Sequence; identical to SEQ ID NO: 802
  illustrative antigen binding domain 21
  Relationship to another sequence: Variation of SEQ ID NO: 197

SEQ ID NO: 819 - protein, 226 aa, Artificial Sequence; identical to SEQ ID NO: 802
  illustrative antigen binding domain 21
  Relationship to another sequence: Variation of SEQ ID NO: 197

SEQ ID NO: 820 - protein, 226 aa, Artificial Sequence; identical to SEQ ID NO: 802
  illustrative antigen binding domain 21
  Relationship to another sequence: Variation of SEQ ID NO: 197

SEQ ID NO: 821 - protein, 226 aa, Artificial Sequence; identical to SEQ ID NO: 802
  illustrative antigen binding domain 21
  Relationship to another sequence: Variation of SEQ ID NO: 197

SEQ ID NO: 822 - protein, 226 aa, Artificial Sequence; identical to SEQ ID NO: 802
  illustrative antigen binding domain 21
  Relationship to another sequence: Variation of SEQ ID NO: 197

SEQ ID NO: 823 - protein, 226 aa, Artificial Sequence; identical to SEQ ID NO: 802
  illustrative antigen binding domain 21
  Relationship to another sequence: Variation of SEQ ID NO: 197

SEQ ID NO: 824 - protein, 226 aa, Artificial Sequence; identical to SEQ ID NO: 802
  illustrative antigen binding domain 21
  Relationship to another sequence: Variation of SEQ ID NO: 197

SEQ ID NO: 825 - protein, 226 aa, Artificial Sequence; identical to SEQ ID NO: 802
  illustrative antigen binding domain 21
  Relationship to another sequence: Variation of SEQ ID NO: 197

SEQ ID NO: 826 - protein, 226 aa, Artificial Sequence; identical to SEQ ID NO: 802
  illustrative antigen binding domain 21
  Relationship to another sequence: Variation of SEQ ID NO: 197

SEQ ID NO: 827 - protein, 226 aa, Artificial Sequence; identical to SEQ ID NO: 802
  illustrative antigen binding domain 21
  Relationship to another sequence: Variation of SEQ ID NO: 197

SEQ ID NO: 828 - protein, 226 aa, Artificial Sequence; identical to SEQ ID NO: 802
  illustrative antigen binding domain 21
  Relationship to another sequence: Variation of SEQ ID NO: 197

SEQ ID NO: 829 - protein, 226 aa, Artificial Sequence; identical to SEQ ID NO: 802
  illustrative antigen binding domain 21
  Relationship to another sequence: Variation of SEQ ID NO: 197

SEQ ID NO: 830 - protein, 226 aa, Artificial Sequence; identical to SEQ ID NO: 802
  illustrative antigen binding domain 21
  Relationship to another sequence: Variation of SEQ ID NO: 197

SEQ ID NO: 831 - protein, 228 aa, Artificial Sequence
  illustrative antigen binding domain 22
  Relationship to another sequence: Variation of SEQ ID NO: 198
QVQLQQSGAEVKKPGASVKVSCKASGYTFTSYAMHWVRQAPGQRLEWMGWINAGNGNTKYSQKFQGRVTITRDTSASTAYMELSSLRSEDTAVYYCARVSSGGAFDIWGQGTVVTVSSQSALTQPASVSGSPGQSITISCTGTGSDVGGYKYVSWYQHHPGKAPRLIIYDVNYWPSGVSHRFSGSKSGNTASLTISGLQSEDEADYYCSSYRTGDTWVFGGGTKLTVL

SEQ ID NO: 832 - protein, 228 aa, Artificial Sequence; identical to SEQ ID NO: 831
  illustrative antigen binding domain 22
  Relationship to another sequence: Variation of SEQ ID NO: 198

SEQ ID NO: 833 - protein, 228 aa, Artificial Sequence; identical to SEQ ID NO: 831
  illustrative antigen binding domain 22
  Relationship to another sequence: Variation of SEQ ID NO: 198

SEQ ID NO: 834 - protein, 228 aa, Artificial Sequence; identical to SEQ ID NO: 831
  illustrative antigen binding domain 22
  Relationship to another sequence: Variation of SEQ ID NO: 198

SEQ ID NO: 835 - protein, 228 aa, Artificial Sequence; identical to SEQ ID NO: 831
  illustrative antigen binding domain 22
  Relationship to another sequence: Variation of SEQ ID NO: 198

SEQ ID NO: 836 - protein, 228 aa, Artificial Sequence; identical to SEQ ID NO: 831
  illustrative antigen binding domain 22
  Relationship to another sequence: Variation of SEQ ID NO: 198

SEQ ID NO: 837 - protein, 228 aa, Artificial Sequence; identical to SEQ ID NO: 831
  illustrative antigen binding domain 22
  Relationship to another sequence: Variation of SEQ ID NO: 198

SEQ ID NO: 838 - protein, 228 aa, Artificial Sequence; identical to SEQ ID NO: 831
  illustrative antigen binding domain 22
  Relationship to another sequence: Variation of SEQ ID NO: 198

SEQ ID NO: 839 - protein, 228 aa, Artificial Sequence; identical to SEQ ID NO: 831
  illustrative antigen binding domain 22
  Relationship to another sequence: Variation of SEQ ID NO: 198

SEQ ID NO: 840 - protein, 228 aa, Artificial Sequence; identical to SEQ ID NO: 831
  illustrative antigen binding domain 22
  Relationship to another sequence: Variation of SEQ ID NO: 198

SEQ ID NO: 841 - protein, 228 aa, Artificial Sequence; identical to SEQ ID NO: 831
  illustrative antigen binding domain 22
  Relationship to another sequence: Variation of SEQ ID NO: 198

SEQ ID NO: 842 - protein, 228 aa, Artificial Sequence; identical to SEQ ID NO: 831
  illustrative antigen binding domain 22
  Relationship to another sequence: Variation of SEQ ID NO: 198

SEQ ID NO: 843 - protein, 228 aa, Artificial Sequence; identical to SEQ ID NO: 831
  illustrative antigen binding domain 22
  Relationship to another sequence: Variation of SEQ ID NO: 198

SEQ ID NO: 844 - protein, 228 aa, Artificial Sequence; identical to SEQ ID NO: 831
  illustrative antigen binding domain 22
  Relationship to another sequence: Variation of SEQ ID NO: 198

SEQ ID NO: 845 - protein, 228 aa, Artificial Sequence; identical to SEQ ID NO: 831
  illustrative antigen binding domain 22
  Relationship to another sequence: Variation of SEQ ID NO: 198

SEQ ID NO: 846 - protein, 228 aa, Artificial Sequence; identical to SEQ ID NO: 831
  illustrative antigen binding domain 22
  Relationship to another sequence: Variation of SEQ ID NO: 198

SEQ ID NO: 847 - protein, 228 aa, Artificial Sequence; identical to SEQ ID NO: 831
  illustrative antigen binding domain 22
  Relationship to another sequence: Variation of SEQ ID NO: 198

SEQ ID NO: 848 - protein, 228 aa, Artificial Sequence; identical to SEQ ID NO: 831
  illustrative antigen binding domain 22
  Relationship to another sequence: Variation of SEQ ID NO: 198

SEQ ID NO: 849 - protein, 228 aa, Artificial Sequence; identical to SEQ ID NO: 831
  illustrative antigen binding domain 22
  Relationship to another sequence: Variation of SEQ ID NO: 198

SEQ ID NO: 850 - protein, 228 aa, Artificial Sequence; identical to SEQ ID NO: 831
  illustrative antigen binding domain 22
  Relationship to another sequence: Variation of SEQ ID NO: 198

SEQ ID NO: 851 - protein, 228 aa, Artificial Sequence; identical to SEQ ID NO: 831
  illustrative antigen binding domain 22
  Relationship to another sequence: Variation of SEQ ID NO: 198

SEQ ID NO: 852 - protein, 228 aa, Artificial Sequence; identical to SEQ ID NO: 831
  illustrative antigen binding domain 22
  Relationship to another sequence: Variation of SEQ ID NO: 198

SEQ ID NO: 853 - protein, 228 aa, Artificial Sequence; identical to SEQ ID NO: 831
  illustrative antigen binding domain 22
  Relationship to another sequence: Variation of SEQ ID NO: 198

SEQ ID NO: 854 - protein, 228 aa, Artificial Sequence; identical to SEQ ID NO: 831
  illustrative antigen binding domain 22
  Relationship to another sequence: Variation of SEQ ID NO: 198

SEQ ID NO: 855 - protein, 228 aa, Artificial Sequence; identical to SEQ ID NO: 831
  illustrative antigen binding domain 22
  Relationship to another sequence: Variation of SEQ ID NO: 198

SEQ ID NO: 856 - protein, 228 aa, Artificial Sequence; identical to SEQ ID NO: 831
  illustrative antigen binding domain 22
  Relationship to another sequence: Variation of SEQ ID NO: 198

SEQ ID NO: 857 - protein, 228 aa, Artificial Sequence; identical to SEQ ID NO: 831
  illustrative antigen binding domain 22
  Relationship to another sequence: Variation of SEQ ID NO: 198

SEQ ID NO: 858 - protein, 228 aa, Artificial Sequence; identical to SEQ ID NO: 831
  illustrative antigen binding domain 22
  Relationship to another sequence: Variation of SEQ ID NO: 198

SEQ ID NO: 859 - protein, 228 aa, Artificial Sequence; identical to SEQ ID NO: 831
  illustrative antigen binding domain 22
  Relationship to another sequence: Variation of SEQ ID NO: 198

SEQ ID NO: 860 - protein, 230 aa, Artificial Sequence
  illustrative antigen binding domain 23
  Relationship to another sequence: Variation of SEQ ID NO: 199
QVQLVQSGAEVKKPGSSVKVSCKASGGTFSSYGFSWVRQAPGQGLEWMGEIIPMFGTANYAQKLQGRVTITAETSTSTVYMELSSLRSEDTATYYCARVPRSSSGYNYGMDVWGQGTTVTVSSDIQMTQSPSSLSASVGDRVTITCRASQGISNYLAWYQQKPGKVPKLLIYAASTLQSGVPSRFSGSGSGTDFTLTISSLQPEDVATYYCQKYNSAPRTFGQGTKVEIK

SEQ ID NO: 861 - protein, 230 aa, Artificial Sequence; identical to SEQ ID NO: 860
  illustrative antigen binding domain 23
  Relationship to another sequence: Variation of SEQ ID NO: 199

SEQ ID NO: 862 - protein, 230 aa, Artificial Sequence; identical to SEQ ID NO: 860
  illustrative antigen binding domain 23
  Relationship to another sequence: Variation of SEQ ID NO: 199

SEQ ID NO: 863 - protein, 230 aa, Artificial Sequence; identical to SEQ ID NO: 860
  illustrative antigen binding domain 23
  Relationship to another sequence: Variation of SEQ ID NO: 199

SEQ ID NO: 864 - protein, 230 aa, Artificial Sequence; identical to SEQ ID NO: 860
  illustrative antigen binding domain 23
  Relationship to another sequence: Variation of SEQ ID NO: 199

SEQ ID NO: 865 - protein, 230 aa, Artificial Sequence; identical to SEQ ID NO: 860
  illustrative antigen binding domain 23
  Relationship to another sequence: Variation of SEQ ID NO: 199

SEQ ID NO: 866 - protein, 230 aa, Artificial Sequence; identical to SEQ ID NO: 860
  illustrative antigen binding domain 23
  Relationship to another sequence: Variation of SEQ ID NO: 199

SEQ ID NO: 867 - protein, 230 aa, Artificial Sequence; identical to SEQ ID NO: 860
  illustrative antigen binding domain 23
  Relationship to another sequence: Variation of SEQ ID NO: 199

SEQ ID NO: 868 - protein, 230 aa, Artificial Sequence; identical to SEQ ID NO: 860
  illustrative antigen binding domain 23
  Relationship to another sequence: Variation of SEQ ID NO: 199

SEQ ID NO: 869 - protein, 230 aa, Artificial Sequence; identical to SEQ ID NO: 860
  illustrative antigen binding domain 23
  Relationship to another sequence: Variation of SEQ ID NO: 199

SEQ ID NO: 870 - protein, 230 aa, Artificial Sequence; identical to SEQ ID NO: 860
  illustrative antigen binding domain 23
  Relationship to another sequence: Variation of SEQ ID NO: 199

SEQ ID NO: 871 - protein, 230 aa, Artificial Sequence; identical to SEQ ID NO: 860
  illustrative antigen binding domain 23
  Relationship to another sequence: Variation of SEQ ID NO: 199

SEQ ID NO: 872 - protein, 230 aa, Artificial Sequence; identical to SEQ ID NO: 860
  illustrative antigen binding domain 23
  Relationship to another sequence: Variation of SEQ ID NO: 199

SEQ ID NO: 873 - protein, 230 aa, Artificial Sequence; identical to SEQ ID NO: 860
  illustrative antigen binding domain 23
  Relationship to another sequence: Variation of SEQ ID NO: 199

SEQ ID NO: 874 - protein, 230 aa, Artificial Sequence; identical to SEQ ID NO: 860
  illustrative antigen binding domain 23
  Relationship to another sequence: Variation of SEQ ID NO: 199

SEQ ID NO: 875 - protein, 230 aa, Artificial Sequence; identical to SEQ ID NO: 860
  illustrative antigen binding domain 23
  Relationship to another sequence: Variation of SEQ ID NO: 199

SEQ ID NO: 876 - protein, 230 aa, Artificial Sequence; identical to SEQ ID NO: 860
  illustrative antigen binding domain 23
  Relationship to another sequence: Variation of SEQ ID NO: 199

SEQ ID NO: 877 - protein, 230 aa, Artificial Sequence; identical to SEQ ID NO: 860
  illustrative antigen binding domain 23
  Relationship to another sequence: Variation of SEQ ID NO: 199

SEQ ID NO: 878 - protein, 230 aa, Artificial Sequence; identical to SEQ ID NO: 860
  illustrative antigen binding domain 23
  Relationship to another sequence: Variation of SEQ ID NO: 199

SEQ ID NO: 879 - protein, 230 aa, Artificial Sequence; identical to SEQ ID NO: 860
  illustrative antigen binding domain 23
  Relationship to another sequence: Variation of SEQ ID NO: 199

SEQ ID NO: 880 - protein, 230 aa, Artificial Sequence; identical to SEQ ID NO: 860
  illustrative antigen binding domain 23
  Relationship to another sequence: Variation of SEQ ID NO: 199

SEQ ID NO: 881 - protein, 230 aa, Artificial Sequence; identical to SEQ ID NO: 860
  illustrative antigen binding domain 23
  Relationship to another sequence: Variation of SEQ ID NO: 199

SEQ ID NO: 882 - protein, 230 aa, Artificial Sequence; identical to SEQ ID NO: 860
  illustrative antigen binding domain 23
  Relationship to another sequence: Variation of SEQ ID NO: 199

SEQ ID NO: 883 - protein, 230 aa, Artificial Sequence; identical to SEQ ID NO: 860
  illustrative antigen binding domain 23
  Relationship to another sequence: Variation of SEQ ID NO: 199

SEQ ID NO: 884 - protein, 230 aa, Artificial Sequence; identical to SEQ ID NO: 860
  illustrative antigen binding domain 23
  Relationship to another sequence: Variation of SEQ ID NO: 199

SEQ ID NO: 885 - protein, 230 aa, Artificial Sequence; identical to SEQ ID NO: 860
  illustrative antigen binding domain 23
  Relationship to another sequence: Variation of SEQ ID NO: 199

SEQ ID NO: 886 - protein, 230 aa, Artificial Sequence; identical to SEQ ID NO: 860
  illustrative antigen binding domain 23
  Relationship to another sequence: Variation of SEQ ID NO: 199

SEQ ID NO: 887 - protein, 230 aa, Artificial Sequence; identical to SEQ ID NO: 860
  illustrative antigen binding domain 23
  Relationship to another sequence: Variation of SEQ ID NO: 199

SEQ ID NO: 888 - protein, 230 aa, Artificial Sequence; identical to SEQ ID NO: 860
  illustrative antigen binding domain 23
  Relationship to another sequence: Variation of SEQ ID NO: 199

SEQ ID NO: 889 - protein, 232 aa, Artificial Sequence
  illustrative antigen binding domain 24
  Relationship to another sequence: Variation of SEQ ID NO: 200
QVQLQQSGPGLLKPSQTLSLTCAVSGDSVSTNSGAWSWIRQSPSRGLEWLGRTYYRSKWSTDYALSLQSRVTIKSDRSKNQFSLQLDSVTPEDTAIYYCARENWNSGGFDYWGQGTLVTVPSQPVLTQSSSASGSPGQSVTISCTGTSSDVGGYNYVSWYQQHPGKAPKLMIYEVSKRPSGVPDRFSGSKSGSTASLTVSGLQAEDEAEYYCSSYAGSNNYVFGTGTKVTVL

SEQ ID NO: 890 - protein, 232 aa, Artificial Sequence; identical to SEQ ID NO: 889
  illustrative antigen binding domain 24
  Relationship to another sequence: Variation of SEQ ID NO: 200

SEQ ID NO: 891 - protein, 232 aa, Artificial Sequence; identical to SEQ ID NO: 889
  illustrative antigen binding domain 24
  Relationship to another sequence: Variation of SEQ ID NO: 200

SEQ ID NO: 892 - protein, 232 aa, Artificial Sequence; identical to SEQ ID NO: 889
  illustrative antigen binding domain 24
  Relationship to another sequence: Variation of SEQ ID NO: 200

SEQ ID NO: 893 - protein, 232 aa, Artificial Sequence; identical to SEQ ID NO: 889
  illustrative antigen binding domain 24
  Relationship to another sequence: Variation of SEQ ID NO: 200

SEQ ID NO: 894 - protein, 232 aa, Artificial Sequence; identical to SEQ ID NO: 889
  illustrative antigen binding domain 24
  Relationship to another sequence: Variation of SEQ ID NO: 200

SEQ ID NO: 895 - protein, 232 aa, Artificial Sequence; identical to SEQ ID NO: 889
  illustrative antigen binding domain 24
  Relationship to another sequence: Variation of SEQ ID NO: 200

SEQ ID NO: 896 - protein, 232 aa, Artificial Sequence; identical to SEQ ID NO: 889
  illustrative antigen binding domain 24
  Relationship to another sequence: Variation of SEQ ID NO: 200

SEQ ID NO: 897 - protein, 232 aa, Artificial Sequence; identical to SEQ ID NO: 889
  illustrative antigen binding domain 24
  Relationship to another sequence: Variation of SEQ ID NO: 200

SEQ ID NO: 898 - protein, 232 aa, Artificial Sequence; identical to SEQ ID NO: 889
  illustrative antigen binding domain 24
  Relationship to another sequence: Variation of SEQ ID NO: 200

SEQ ID NO: 899 - protein, 232 aa, Artificial Sequence; identical to SEQ ID NO: 889
  illustrative antigen binding domain 24
  Relationship to another sequence: Variation of SEQ ID NO: 200

SEQ ID NO: 900 - protein, 232 aa, Artificial Sequence; identical to SEQ ID NO: 889
  illustrative antigen binding domain 24
  Relationship to another sequence: Variation of SEQ ID NO: 200

SEQ ID NO: 901 - protein, 232 aa, Artificial Sequence; identical to SEQ ID NO: 889
  illustrative antigen binding domain 24
  Relationship to another sequence: Variation of SEQ ID NO: 200

SEQ ID NO: 902 - protein, 232 aa, Artificial Sequence; identical to SEQ ID NO: 889
  illustrative antigen binding domain 24
  Relationship to another sequence: Variation of SEQ ID NO: 200

SEQ ID NO: 903 - protein, 232 aa, Artificial Sequence; identical to SEQ ID NO: 889
  illustrative antigen binding domain 24
  Relationship to another sequence: Variation of SEQ ID NO: 200

SEQ ID NO: 904 - protein, 232 aa, Artificial Sequence; identical to SEQ ID NO: 889
  illustrative antigen binding domain 24
  Relationship to another sequence: Variation of SEQ ID NO: 200

SEQ ID NO: 905 - protein, 232 aa, Artificial Sequence; identical to SEQ ID NO: 889
  illustrative antigen binding domain 24
  Relationship to another sequence: Variation of SEQ ID NO: 200

SEQ ID NO: 906 - protein, 232 aa, Artificial Sequence; identical to SEQ ID NO: 889
  illustrative antigen binding domain 24
  Relationship to another sequence: Variation of SEQ ID NO: 200

SEQ ID NO: 907 - protein, 232 aa, Artificial Sequence; identical to SEQ ID NO: 889
  illustrative antigen binding domain 24
  Relationship to another sequence: Variation of SEQ ID NO: 200

SEQ ID NO: 908 - protein, 232 aa, Artificial Sequence; identical to SEQ ID NO: 889
  illustrative antigen binding domain 24
  Relationship to another sequence: Variation of SEQ ID NO: 200

SEQ ID NO: 909 - protein, 232 aa, Artificial Sequence; identical to SEQ ID NO: 889
  illustrative antigen binding domain 24
  Relationship to another sequence: Variation of SEQ ID NO: 200

SEQ ID NO: 910 - protein, 232 aa, Artificial Sequence; identical to SEQ ID NO: 889
  illustrative antigen binding domain 24
  Relationship to another sequence: Variation of SEQ ID NO: 200

SEQ ID NO: 911 - protein, 232 aa, Artificial Sequence; identical to SEQ ID NO: 889
  illustrative antigen binding domain 24
  Relationship to another sequence: Variation of SEQ ID NO: 200

SEQ ID NO: 912 - protein, 232 aa, Artificial Sequence; identical to SEQ ID NO: 889
  illustrative antigen binding domain 24
  Relationship to another sequence: Variation of SEQ ID NO: 200

SEQ ID NO: 913 - protein, 232 aa, Artificial Sequence; identical to SEQ ID NO: 889
  illustrative antigen binding domain 24
  Relationship to another sequence: Variation of SEQ ID NO: 200

SEQ ID NO: 914 - protein, 232 aa, Artificial Sequence; identical to SEQ ID NO: 889
  illustrative antigen binding domain 24
  Relationship to another sequence: Variation of SEQ ID NO: 200

SEQ ID NO: 915 - protein, 232 aa, Artificial Sequence; identical to SEQ ID NO: 889
  illustrative antigen binding domain 24
  Relationship to another sequence: Variation of SEQ ID NO: 200

SEQ ID NO: 916 - protein, 232 aa, Artificial Sequence; identical to SEQ ID NO: 889
  illustrative antigen binding domain 24
  Relationship to another sequence: Variation of SEQ ID NO: 200

SEQ ID NO: 917 - protein, 232 aa, Artificial Sequence; identical to SEQ ID NO: 889
  illustrative antigen binding domain 24
  Relationship to another sequence: Variation of SEQ ID NO: 200

SEQ ID NO: 918 - protein, 231 aa, Artificial Sequence
  illustrative antigen binding domain 25
  Relationship to another sequence: Variation of SEQ ID NO: 201
EVQLVESGAEVKKPGSSVKVSCKASGGTFSSYAISWVRQAPGQGLEWMGGIIPIFGTANYAQKFQGRVTITADKSTSTAYMELSSLRSEDTAVYYCARAASRWEPGDAFDIWGQGTMVTVSSQPVLTQSSSVSVAPGKTARVTCGGDNIGGKSVHWYQQRAGQAPVLVISHDTDRPSGIPERFSGSKSGTSASLAISGLRSEDEADYYCAVWDASLGGSWLFGGGTKLTVL

SEQ ID NO: 919 - protein, 231 aa, Artificial Sequence; identical to SEQ ID NO: 918
  illustrative antigen binding domain 25
  Relationship to another sequence: Variation of SEQ ID NO: 201

SEQ ID NO: 920 - protein, 231 aa, Artificial Sequence; identical to SEQ ID NO: 918
  illustrative antigen binding domain 25
  Relationship to another sequence: Variation of SEQ ID NO: 201

SEQ ID NO: 921 - protein, 231 aa, Artificial Sequence; identical to SEQ ID NO: 918
  illustrative antigen binding domain 25
  Relationship to another sequence: Variation of SEQ ID NO: 201

SEQ ID NO: 922 - protein, 231 aa, Artificial Sequence; identical to SEQ ID NO: 918
  illustrative antigen binding domain 25
  Relationship to another sequence: Variation of SEQ ID NO: 201

SEQ ID NO: 923 - protein, 231 aa, Artificial Sequence; identical to SEQ ID NO: 918
  illustrative antigen binding domain 25
  Relationship to another sequence: Variation of SEQ ID NO: 201

SEQ ID NO: 924 - protein, 231 aa, Artificial Sequence; identical to SEQ ID NO: 918
  illustrative antigen binding domain 25
  Relationship to another sequence: Variation of SEQ ID NO: 201

SEQ ID NO: 925 - protein, 231 aa, Artificial Sequence; identical to SEQ ID NO: 918
  illustrative antigen binding domain 25
  Relationship to another sequence: Variation of SEQ ID NO: 201

SEQ ID NO: 926 - protein, 231 aa, Artificial Sequence; identical to SEQ ID NO: 918
  illustrative antigen binding domain 25
  Relationship to another sequence: Variation of SEQ ID NO: 201

SEQ ID NO: 927 - protein, 231 aa, Artificial Sequence; identical to SEQ ID NO: 918
  illustrative antigen binding domain 25
  Relationship to another sequence: Variation of SEQ ID NO: 201

SEQ ID NO: 928 - protein, 231 aa, Artificial Sequence; identical to SEQ ID NO: 918
  illustrative antigen binding domain 25
  Relationship to another sequence: Variation of SEQ ID NO: 201

SEQ ID NO: 929 - protein, 231 aa, Artificial Sequence; identical to SEQ ID NO: 918
  illustrative antigen binding domain 25
  Relationship to another sequence: Variation of SEQ ID NO: 201

SEQ ID NO: 930 - protein, 231 aa, Artificial Sequence; identical to SEQ ID NO: 918
  illustrative antigen binding domain 25
  Relationship to another sequence: Variation of SEQ ID NO: 201

SEQ ID NO: 931 - protein, 231 aa, Artificial Sequence; identical to SEQ ID NO: 918
  illustrative antigen binding domain 25
  Relationship to another sequence: Variation of SEQ ID NO: 201

SEQ ID NO: 932 - protein, 231 aa, Artificial Sequence; identical to SEQ ID NO: 918
  illustrative antigen binding domain 25
  Relationship to another sequence: Variation of SEQ ID NO: 201

SEQ ID NO: 933 - protein, 231 aa, Artificial Sequence; identical to SEQ ID NO: 918
  illustrative antigen binding domain 25
  Relationship to another sequence: Variation of SEQ ID NO: 201

SEQ ID NO: 934 - protein, 231 aa, Artificial Sequence; identical to SEQ ID NO: 918
  illustrative antigen binding domain 25
  Relationship to another sequence: Variation of SEQ ID NO: 201

SEQ ID NO: 935 - protein, 231 aa, Artificial Sequence; identical to SEQ ID NO: 918
  illustrative antigen binding domain 25
  Relationship to another sequence: Variation of SEQ ID NO: 201

SEQ ID NO: 936 - protein, 231 aa, Artificial Sequence; identical to SEQ ID NO: 918
  illustrative antigen binding domain 25
  Relationship to another sequence: Variation of SEQ ID NO: 201

SEQ ID NO: 937 - protein, 231 aa, Artificial Sequence; identical to SEQ ID NO: 918
  illustrative antigen binding domain 25
  Relationship to another sequence: Variation of SEQ ID NO: 201

SEQ ID NO: 938 - protein, 231 aa, Artificial Sequence; identical to SEQ ID NO: 918
  illustrative antigen binding domain 25
  Relationship to another sequence: Variation of SEQ ID NO: 201

SEQ ID NO: 939 - protein, 231 aa, Artificial Sequence; identical to SEQ ID NO: 918
  illustrative antigen binding domain 25
  Relationship to another sequence: Variation of SEQ ID NO: 201

SEQ ID NO: 940 - protein, 231 aa, Artificial Sequence; identical to SEQ ID NO: 918
  illustrative antigen binding domain 25
  Relationship to another sequence: Variation of SEQ ID NO: 201

SEQ ID NO: 941 - protein, 231 aa, Artificial Sequence; identical to SEQ ID NO: 918
  illustrative antigen binding domain 25
  Relationship to another sequence: Variation of SEQ ID NO: 201

SEQ ID NO: 942 - protein, 231 aa, Artificial Sequence; identical to SEQ ID NO: 918
  illustrative antigen binding domain 25
  Relationship to another sequence: Variation of SEQ ID NO: 201

SEQ ID NO: 943 - protein, 231 aa, Artificial Sequence; identical to SEQ ID NO: 918
  illustrative antigen binding domain 25
  Relationship to another sequence: Variation of SEQ ID NO: 201

SEQ ID NO: 944 - protein, 231 aa, Artificial Sequence; identical to SEQ ID NO: 918
  illustrative antigen binding domain 25
  Relationship to another sequence: Variation of SEQ ID NO: 201

SEQ ID NO: 945 - protein, 231 aa, Artificial Sequence; identical to SEQ ID NO: 918
  illustrative antigen binding domain 25
  Relationship to another sequence: Variation of SEQ ID NO: 201

SEQ ID NO: 946 - protein, 231 aa, Artificial Sequence; identical to SEQ ID NO: 918
  illustrative antigen binding domain 25
  Relationship to another sequence: Variation of SEQ ID NO: 201

SEQ ID NO: 947 - protein, 234 aa, Artificial Sequence
  illustrative antigen binding domain 26
  Relationship to another sequence: Variation of SEQ ID NO: 202
QVQLVQSGAEVKKPGASVKVSCKTSGYTFTSYDISWVRQAPGQGLEWMGWISAYNGNTNYAQKLQGRVTMTTDTSTSTAYMELRRLRSDDTAVYYCARGGRWLRSASSFDYWGQGTLVTVSSQAGLTQPPSVSGAPGQRVTISCTGSSSNIGAAYDVHWYQQLPGAAPKLLIFGDSNRPSGVPDRFSGSKSDTSASLAITGLQAEDEADYYCQSFDSSLSGSRVFGGGTKLTVL

SEQ ID NO: 948 - protein, 234 aa, Artificial Sequence; identical to SEQ ID NO: 947
  illustrative antigen binding domain 26
  Relationship to another sequence: Variation of SEQ ID NO: 202

SEQ ID NO: 949 - protein, 234 aa, Artificial Sequence; identical to SEQ ID NO: 947
  illustrative antigen binding domain 26
  Relationship to another sequence: Variation of SEQ ID NO: 202

SEQ ID NO: 950 - protein, 234 aa, Artificial Sequence; identical to SEQ ID NO: 947
  illustrative antigen binding domain 26
  Relationship to another sequence: Variation of SEQ ID NO: 202

SEQ ID NO: 951 - protein, 234 aa, Artificial Sequence; identical to SEQ ID NO: 947
  illustrative antigen binding domain 26
  Relationship to another sequence: Variation of SEQ ID NO: 202

SEQ ID NO: 952 - protein, 234 aa, Artificial Sequence; identical to SEQ ID NO: 947
  illustrative antigen binding domain 26
  Relationship to another sequence: Variation of SEQ ID NO: 202

SEQ ID NO: 953 - protein, 234 aa, Artificial Sequence; identical to SEQ ID NO: 947
  illustrative antigen binding domain 26
  Relationship to another sequence: Variation of SEQ ID NO: 202

SEQ ID NO: 954 - protein, 234 aa, Artificial Sequence; identical to SEQ ID NO: 947
  illustrative antigen binding domain 26
  Relationship to another sequence: Variation of SEQ ID NO: 202

SEQ ID NO: 955 - protein, 234 aa, Artificial Sequence; identical to SEQ ID NO: 947
  illustrative antigen binding domain 26
  Relationship to another sequence: Variation of SEQ ID NO: 202

SEQ ID NO: 956 - protein, 234 aa, Artificial Sequence; identical to SEQ ID NO: 947
  illustrative antigen binding domain 26
  Relationship to another sequence: Variation of SEQ ID NO: 202

SEQ ID NO: 957 - protein, 234 aa, Artificial Sequence; identical to SEQ ID NO: 947
  illustrative antigen binding domain 26
  Relationship to another sequence: Variation of SEQ ID NO: 202

SEQ ID NO: 958 - protein, 234 aa, Artificial Sequence; identical to SEQ ID NO: 947
  illustrative antigen binding domain 26
  Relationship to another sequence: Variation of SEQ ID NO: 202

SEQ ID NO: 959 - protein, 234 aa, Artificial Sequence; identical to SEQ ID NO: 947
  illustrative antigen binding domain 26
  Relationship to another sequence: Variation of SEQ ID NO: 202

SEQ ID NO: 960 - protein, 234 aa, Artificial Sequence; identical to SEQ ID NO: 947
  illustrative antigen binding domain 26
  Relationship to another sequence: Variation of SEQ ID NO: 202

SEQ ID NO: 961 - protein, 234 aa, Artificial Sequence; identical to SEQ ID NO: 947
  illustrative antigen binding domain 26
  Relationship to another sequence: Variation of SEQ ID NO: 202

SEQ ID NO: 962 - protein, 234 aa, Artificial Sequence; identical to SEQ ID NO: 947
  illustrative antigen binding domain 26
  Relationship to another sequence: Variation of SEQ ID NO: 202

SEQ ID NO: 963 - protein, 234 aa, Artificial Sequence; identical to SEQ ID NO: 947
  illustrative antigen binding domain 26
  Relationship to another sequence: Variation of SEQ ID NO: 202

SEQ ID NO: 964 - protein, 234 aa, Artificial Sequence; identical to SEQ ID NO: 947
  illustrative antigen binding domain 26
  Relationship to another sequence: Variation of SEQ ID NO: 202

SEQ ID NO: 965 - protein, 234 aa, Artificial Sequence; identical to SEQ ID NO: 947
  illustrative antigen binding domain 26
  Relationship to another sequence: Variation of SEQ ID NO: 202

SEQ ID NO: 966 - protein, 234 aa, Artificial Sequence; identical to SEQ ID NO: 947
  illustrative antigen binding domain 26
  Relationship to another sequence: Variation of SEQ ID NO: 202

SEQ ID NO: 967 - protein, 234 aa, Artificial Sequence; identical to SEQ ID NO: 947
  illustrative antigen binding domain 26
  Relationship to another sequence: Variation of SEQ ID NO: 202

SEQ ID NO: 968 - protein, 234 aa, Artificial Sequence; identical to SEQ ID NO: 947
  illustrative antigen binding domain 26
  Relationship to another sequence: Variation of SEQ ID NO: 202

SEQ ID NO: 969 - protein, 234 aa, Artificial Sequence; identical to SEQ ID NO: 947
  illustrative antigen binding domain 26
  Relationship to another sequence: Variation of SEQ ID NO: 202

SEQ ID NO: 970 - protein, 234 aa, Artificial Sequence; identical to SEQ ID NO: 947
  illustrative antigen binding domain 26
  Relationship to another sequence: Variation of SEQ ID NO: 202

SEQ ID NO: 971 - protein, 234 aa, Artificial Sequence; identical to SEQ ID NO: 947
  illustrative antigen binding domain 26
  Relationship to another sequence: Variation of SEQ ID NO: 202

SEQ ID NO: 972 - protein, 234 aa, Artificial Sequence; identical to SEQ ID NO: 947
  illustrative antigen binding domain 26
  Relationship to another sequence: Variation of SEQ ID NO: 202

SEQ ID NO: 973 - protein, 234 aa, Artificial Sequence; identical to SEQ ID NO: 947
  illustrative antigen binding domain 26
  Relationship to another sequence: Variation of SEQ ID NO: 202

SEQ ID NO: 974 - protein, 234 aa, Artificial Sequence; identical to SEQ ID NO: 947
  illustrative antigen binding domain 26
  Relationship to another sequence: Variation of SEQ ID NO: 202

SEQ ID NO: 975 - protein, 234 aa, Artificial Sequence; identical to SEQ ID NO: 947
  illustrative antigen binding domain 26
  Relationship to another sequence: Variation of SEQ ID NO: 202

SEQ ID NO: 976 - protein, 233 aa, Artificial Sequence
  illustrative antigen binding domain 27
  Relationship to another sequence: Variation of SEQ ID NO: 203
EVQLVESGGGLVKPGGSLRLSCAASGFTFSDHYMSWVRQAPGKGLEWVSYITSGGSSIYYADSVKGRFTISRDNAKNSLYLQMNSLRAEDTAVYYCARGLDSSAYQGRAFDIWGQGTMVTVSSLPVLTQPPSASGTPGQRVTISCSGSSSNIGSNPVHWYQQLPGTAPKLLVYRNNQRPSGVPDRFSGSKSGTSASLAISGLRSEDEADYYCAAWDVSLSGVVFGGGTKLTVL

SEQ ID NO: 977 - protein, 233 aa, Artificial Sequence; identical to SEQ ID NO: 976
  illustrative antigen binding domain 27
  Relationship to another sequence: Variation of SEQ ID NO: 203

SEQ ID NO: 978 - protein, 233 aa, Artificial Sequence; identical to SEQ ID NO: 976
  illustrative antigen binding domain 27
  Relationship to another sequence: Variation of SEQ ID NO: 203

SEQ ID NO: 979 - protein, 233 aa, Artificial Sequence; identical to SEQ ID NO: 976
  illustrative antigen binding domain 27
  Relationship to another sequence: Variation of SEQ ID NO: 203

SEQ ID NO: 980 - protein, 233 aa, Artificial Sequence; identical to SEQ ID NO: 976
  illustrative antigen binding domain 27
  Relationship to another sequence: Variation of SEQ ID NO: 203

SEQ ID NO: 981 - protein, 233 aa, Artificial Sequence; identical to SEQ ID NO: 976
  illustrative antigen binding domain 27
  Relationship to another sequence: Variation of SEQ ID NO: 203

SEQ ID NO: 982 - protein, 233 aa, Artificial Sequence; identical to SEQ ID NO: 976
  illustrative antigen binding domain 27
  Relationship to another sequence: Variation of SEQ ID NO: 203

SEQ ID NO: 983 - protein, 233 aa, Artificial Sequence; identical to SEQ ID NO: 976
  illustrative antigen binding domain 27
  Relationship to another sequence: Variation of SEQ ID NO: 203

SEQ ID NO: 984 - protein, 233 aa, Artificial Sequence; identical to SEQ ID NO: 976
  illustrative antigen binding domain 27
  Relationship to another sequence: Variation of SEQ ID NO: 203

SEQ ID NO: 985 - protein, 233 aa, Artificial Sequence; identical to SEQ ID NO: 976
  illustrative antigen binding domain 27
  Relationship to another sequence: Variation of SEQ ID NO: 203

SEQ ID NO: 986 - protein, 233 aa, Artificial Sequence; identical to SEQ ID NO: 976
  illustrative antigen binding domain 27
  Relationship to another sequence: Variation of SEQ ID NO: 203

SEQ ID NO: 987 - protein, 233 aa, Artificial Sequence; identical to SEQ ID NO: 976
  illustrative antigen binding domain 27
  Relationship to another sequence: Variation of SEQ ID NO: 203

SEQ ID NO: 988 - protein, 233 aa, Artificial Sequence; identical to SEQ ID NO: 976
  illustrative antigen binding domain 27
  Relationship to another sequence: Variation of SEQ ID NO: 203

SEQ ID NO: 989 - protein, 233 aa, Artificial Sequence; identical to SEQ ID NO: 976
  illustrative antigen binding domain 27
  Relationship to another sequence: Variation of SEQ ID NO: 203

SEQ ID NO: 990 - protein, 233 aa, Artificial Sequence; identical to SEQ ID NO: 976
  illustrative antigen binding domain 27
  Relationship to another sequence: Variation of SEQ ID NO: 203

SEQ ID NO: 991 - protein, 233 aa, Artificial Sequence; identical to SEQ ID NO: 976
  illustrative antigen binding domain 27
  Relationship to another sequence: Variation of SEQ ID NO: 203

SEQ ID NO: 992 - protein, 233 aa, Artificial Sequence; identical to SEQ ID NO: 976
  illustrative antigen binding domain 27
  Relationship to another sequence: Variation of SEQ ID NO: 203

SEQ ID NO: 993 - protein, 233 aa, Artificial Sequence; identical to SEQ ID NO: 976
  illustrative antigen binding domain 27
  Relationship to another sequence: Variation of SEQ ID NO: 203

SEQ ID NO: 994 - protein, 233 aa, Artificial Sequence; identical to SEQ ID NO: 976
  illustrative antigen binding domain 27
  Relationship to another sequence: Variation of SEQ ID NO: 203

SEQ ID NO: 995 - protein, 233 aa, Artificial Sequence; identical to SEQ ID NO: 976
  illustrative antigen binding domain 27
  Relationship to another sequence: Variation of SEQ ID NO: 203

SEQ ID NO: 996 - protein, 233 aa, Artificial Sequence; identical to SEQ ID NO: 976
  illustrative antigen binding domain 27
  Relationship to another sequence: Variation of SEQ ID NO: 203

SEQ ID NO: 997 - protein, 233 aa, Artificial Sequence; identical to SEQ ID NO: 976
  illustrative antigen binding domain 27
  Relationship to another sequence: Variation of SEQ ID NO: 203

SEQ ID NO: 998 - protein, 233 aa, Artificial Sequence; identical to SEQ ID NO: 976
  illustrative antigen binding domain 27
  Relationship to another sequence: Variation of SEQ ID NO: 203

SEQ ID NO: 999 - protein, 233 aa, Artificial Sequence; identical to SEQ ID NO: 976
  illustrative antigen binding domain 27
  Relationship to another sequence: Variation of SEQ ID NO: 203

SEQ ID NO: 1000 - protein, 233 aa, Artificial Sequence; identical to SEQ ID NO: 976
  illustrative antigen binding domain 27
  Relationship to another sequence: Variation of SEQ ID NO: 203

SEQ ID NO: 1001 - protein, 233 aa, Artificial Sequence; identical to SEQ ID NO: 976
  illustrative antigen binding domain 27
  Relationship to another sequence: Variation of SEQ ID NO: 203

SEQ ID NO: 1002 - protein, 233 aa, Artificial Sequence; identical to SEQ ID NO: 976
  illustrative antigen binding domain 27
  Relationship to another sequence: Variation of SEQ ID NO: 203

SEQ ID NO: 1003 - protein, 233 aa, Artificial Sequence; identical to SEQ ID NO: 976
  illustrative antigen binding domain 27
  Relationship to another sequence: Variation of SEQ ID NO: 203

SEQ ID NO: 1004 - protein, 233 aa, Artificial Sequence; identical to SEQ ID NO: 976
  illustrative antigen binding domain 27
  Relationship to another sequence: Variation of SEQ ID NO: 203

SEQ ID NO: 1005 - protein, 227 aa, Artificial Sequence
  illustrative antigen binding domain 2
  Relationship to another sequence: Variation of SEQ ID NO: 278
  misc_feature (118)..(119): Xaa can be any naturally occurring amino acid
QVQLVQSGGGVVQPGGSLRVSCAASGVTLSDYGMHWVRQAPGKGLEWMAFIRNDGSDKYYADSVKGRFTISRDNSKKTVSLQMSSLRAEDTAVYYCAKNGESGPLDYWYFDLWGRGTXXDVVMTQSPSSLSASVGDRVTITCQASQDISNYLNWYQQKPGKAPKLLIYDASNLETGVPSRFSGSGSGTDFTFTISSLQPEDIATYYCQQYDNLPPTFGGGTKLTVLG

SEQ ID NO: 1006 - protein, 228 aa, Artificial Sequence
  illustrative antigen binding domain 2
  Relationship to another sequence: Variation of SEQ ID NO: 278
  misc_feature (118)..(120): Xaa can be any naturally occurring amino acid
QVQLVQSGGGVVQPGGSLRVSCAASGVTLSDYGMHWVRQAPGKGLEWMAFIRNDGSDKYYADSVKGRFTISRDNSKKTVSLQMSSLRAEDTAVYYCAKNGESGPLDYWYFDLWGRGTXXXDVVMTQSPSSLSASVGDRVTITCQASQDISNYLNWYQQKPGKAPKLLIYDASNLETGVPSRFSGSGSGTDFTFTISSLQPEDIATYYCQQYDNLPPTFGGGTKLTVLG

SEQ ID NO: 1007 - protein, 229 aa, Artificial Sequence
  illustrative antigen binding domain 2
  Relationship to another sequence: Variation of SEQ ID NO: 278
  misc_feature (118)..(121): Xaa can be any naturally occurring amino acid
QVQLVQSGGGVVQPGGSLRVSCAASGVTLSDYGMHWVRQAPGKGLEWMAFIRNDGSDKYYADSVKGRFTISRDNSKKTVSLQMSSLRAEDTAVYYCAKNGESGPLDYWYFDLWGRGTXXXXDVVMTQSPSSLSASVGDRVTITCQASQDISNYLNWYQQKPGKAPKLLIYDASNLETGVPSRFSGSGSGTDFTFTISSLQPEDIATYYCQQYDNLPPTFGGGTKLTVLG

SEQ ID NO: 1008 - protein, 230 aa, Artificial Sequence
  illustrative antigen binding domain 2
  Relationship to another sequence: Variation of SEQ ID NO: 278
  misc_feature (118)..(122): Xaa can be any naturally occurring amino acid
QVQLVQSGGGVVQPGGSLRVSCAASGVTLSDYGMHWVRQAPGKGLEWMAFIRNDGSDKYYADSVKGRFTISRDNSKKTVSLQMSSLRAEDTAVYYCAKNGESGPLDYWYFDLWGRGTXXXXXDVVMTQSPSSLSASVGDRVTITCQASQDISNYLNWYQQKPGKAPKLLIYDASNLETGVPSRFSGSGSGTDFTFTISSLQPEDIATYYCQQYDNLPPTFGGGTKLTVLG

SEQ ID NO: 1009 - protein, 231 aa, Artificial Sequence
  illustrative antigen binding domain 2
  Relationship to another sequence: Variation of SEQ ID NO: 278
  misc_feature (118)..(123): Xaa can be any naturally occurring amino acid
QVQLVQSGGGVVQPGGSLRVSCAASGVTLSDYGMHWVRQAPGKGLEWMAFIRNDGSDKYYADSVKGRFTISRDNSKKTVSLQMSSLRAEDTAVYYCAKNGESGPLDYWYFDLWGRGTXXXXXXDVVMTQSPSSLSASVGDRVTITCQASQDISNYLNWYQQKPGKAPKLLIYDASNLETGVPSRFSGSGSGTDFTFTISSLQPEDIATYYCQQYDNLPPTFGGGTKLTVLG

SEQ ID NO: 1010 - protein, 232 aa, Artificial Sequence
  illustrative antigen binding domain 2
  Relationship to another sequence: Variation of SEQ ID NO: 278
  misc_feature (118)..(124): Xaa can be any naturally occurring amino acid
QVQLVQSGGGVVQPGGSLRVSCAASGVTLSDYGMHWVRQAPGKGLEWMAFIRNDGSDKYYADSVKGRFTISRDNSKKTVSLQMSSLRAEDTAVYYCAKNGESGPLDYWYFDLWGRGTXXXXXXXDVVMTQSPSSLSASVGDRVTITCQASQDISNYLNWYQQKPGKAPKLLIYDASNLETGVPSRFSGSGSGTDFTFTISSLQPEDIATYYCQQYDNLPPTFGGGTKLTVLG

SEQ ID NO: 1011 - protein, 233 aa, Artificial Sequence
  illustrative antigen binding domain 2
  Relationship to another sequence: Variation of SEQ ID NO: 278
  misc_feature (118)..(125): Xaa can be any naturally occurring amino acid
QVQLVQSGGGVVQPGGSLRVSCAASGVTLSDYGMHWVRQAPGKGLEWMAFIRNDGSDKYYADSVKGRFTISRDNSKKTVSLQMSSLRAEDTAVYYCAKNGESGPLDYWYFDLWGRGTXXXXXXXXDVVMTQSPSSLSASVGDRVTITCQASQDISNYLNWYQQKPGKAPKLLIYDASNLETGVPSRFSGSGSGTDFTFTISSLQPEDIATYYCQQYDNLPPTFGGGTKLTVLG

SEQ ID NO: 1012 - protein, 234 aa, Artificial Sequence
  illustrative antigen binding domain 2
  Relationship to another sequence: Variation of SEQ ID NO: 278
  misc_feature (118)..(126): Xaa can be any naturally occurring amino acid
QVQLVQSGGGVVQPGGSLRVSCAASGVTLSDYGMHWVRQAPGKGLEWMAFIRNDGSDKYYADSVKGRFTISRDNSKKTVSLQMSSLRAEDTAVYYCAKNGESGPLDYWYFDLWGRGTXXXXXXXXXDVVMTQSPSSLSASVGDRVTITCQASQDISNYLNWYQQKPGKAPKLLIYDASNLETGVPSRFSGSGSGTDFTFTISSLQPEDIATYYCQQYDNLPPTFGGGTKLTVLG

SEQ ID NO: 1013 - protein, 235 aa, Artificial Sequence
  illustrative antigen binding domain 2
  Relationship to another sequence: Variation of SEQ ID NO: 278
  misc_feature (118)..(127): Xaa can be any naturally occurring amino acid
QVQLVQSGGGVVQPGGSLRVSCAASGVTLSDYGMHWVRQAPGKGLEWMAFIRNDGSDKYYADSVKGRFTISRDNSKKTVSLQMSSLRAEDTAVYYCAKNGESGPLDYWYFDLWGRGTXXXXXXXXXXDVVMTQSPSSLSASVGDRVTITCQASQDISNYLNWYQQKPGKAPKLLIYDASNLETGVPSRFSGSGSGTDFTFTISSLQPEDIATYYCQQYDNLPPTFGGGTKLTVLG

SEQ ID NO: 1014 - protein, 236 aa, Artificial Sequence
  illustrative antigen binding domain 2
  Relationship to another sequence: Variation of SEQ ID NO: 278
  misc_feature (118)..(128): Xaa can be any naturally occurring amino acid
QVQLVQSGGGVVQPGGSLRVSCAASGVTLSDYGMHWVRQAPGKGLEWMAFIRNDGSDKYYADSVKGRFTISRDNSKKTVSLQMSSLRAEDTAVYYCAKNGESGPLDYWYFDLWGRGTXXXXXXXXXXXDVVMTQSPSSLSASVGDRVTITCQASQDISNYLNWYQQKPGKAPKLLIYDASNLETGVPSRFSGSGSGTDFTFTISSLQPEDIATYYCQQYDNLPPTFGGGTKLTVLG

SEQ ID NO: 1015 - protein, 237 aa, Artificial Sequence
  illustrative antigen binding domain 2
  Relationship to another sequence: Variation of SEQ ID NO: 278
  misc_feature (118)..(129): Xaa can be any naturally occurring amino acid
QVQLVQSGGGVVQPGGSLRVSCAASGVTLSDYGMHWVRQAPGKGLEWMAFIRNDGSDKYYADSVKGRFTISRDNSKKTVSLQMSSLRAEDTAVYYCAKNGESGPLDYWYFDLWGRGTXXXXXXXXXXXXDVVMTQSPSSLSASVGDRVTITCQASQDISNYLNWYQQKPGKAPKLLIYDASNLETGVPSRFSGSGSGTDFTFTISSLQPEDIATYYCQQYDNLPPTFGGGTKLTVLG

SEQ ID NO: 1016 - protein, 238 aa, Artificial Sequence
  illustrative antigen binding domain 2
  Relationship to another sequence: Variation of SEQ ID NO: 278
  misc_feature (118)..(130): Xaa can be any naturally occurring amino acid
QVQLVQSGGGVVQPGGSLRVSCAASGVTLSDYGMHWVRQAPGKGLEWMAFIRNDGSDKYYADSVKGRFTISRDNSKKTVSLQMSSLRAEDTAVYYCAKNGESGPLDYWYFDLWGRGTXXXXXXXXXXXXXDVVMTQSPSSLSASVGDRVTITCQASQDISNYLNWYQQKPGKAPKLLIYDASNLETGVPSRFSGSGSGTDFTFTISSLQPEDIATYYCQQYDNLPPTFGGGTKLTVLG

SEQ ID NO: 1017 - protein, 239 aa, Artificial Sequence
  illustrative antigen binding domain 2
  Relationship to another sequence: Variation of SEQ ID NO: 278
  misc_feature (118)..(131): Xaa can be any naturally occurring amino acid
QVQLVQSGGGVVQPGGSLRVSCAASGVTLSDYGMHWVRQAPGKGLEWMAFIRNDGSDKYYADSVKGRFTISRDNSKKTVSLQMSSLRAEDTAVYYCAKNGESGPLDYWYFDLWGRGTXXXXXXXXXXXXXXDVVMTQSPSSLSASVGDRVTITCQASQDISNYLNWYQQKPGKAPKLLIYDASNLETGVPSRFSGSGSGTDFTFTISSLQPEDIATYYCQQYDNLPPTFGGGTKLTVLG

SEQ ID NO: 1018 - protein, 240 aa, Artificial Sequence
  illustrative antigen binding domain 2
  Relationship to another sequence: Variation of SEQ ID NO: 278
  misc_feature (118)..(132): Xaa can be any naturally occurring amino acid
QVQLVQSGGGVVQPGGSLRVSCAASGVTLSDYGMHWVRQAPGKGLEWMAFIRNDGSDKYYADSVKGRFTISRDNSKKTVSLQMSSLRAEDTAVYYCAKNGESGPLDYWYFDLWGRGTXXXXXXXXXXXXXXXDVVMTQSPSSLSASVGDRVTITCQASQDISNYLNWYQQKPGKAPKLLIYDASNLETGVPSRFSGSGSGTDFTFTISSLQPEDIATYYCQQYDNLPPTFGGGTKLTVLG

SEQ ID NO: 1019 - protein, 241 aa, Artificial Sequence
  illustrative antigen binding domain 2
  Relationship to another sequence: Variation of SEQ ID NO: 278
  misc_feature (118)..(133): Xaa can be any naturally occurring amino acid
QVQLVQSGGGVVQPGGSLRVSCAASGVTLSDYGMHWVRQAPGKGLEWMAFIRNDGSDKYYADSVKGRFTISRDNSKKTVSLQMSSLRAEDTAVYYCAKNGESGPLDYWYFDLWGRGTXXXXXXXXXXXXXXXXDVVMTQSPSSLSASVGDRVTITCQASQDISNYLNWYQQKPGKAPKLLIYDASNLETGVPSRFSGSGSGTDFTFTISSLQPEDIATYYCQQYDNLPPTFGGGTKLTVLG

SEQ ID NO: 1020 - protein, 242 aa, Artificial Sequence
  illustrative antigen binding domain 2
  Relationship to another sequence: Variation of SEQ ID NO: 278
  misc_feature (118)..(134): Xaa can be any naturally occurring amino acid
QVQLVQSGGGVVQPGGSLRVSCAASGVTLSDYGMHWVRQAPGKGLEWMAFIRNDGSDKYYADSVKGRFTISRDNSKKTVSLQMSSLRAEDTAVYYCAKNGESGPLDYWYFDLWGRGTXXXXXXXXXXXXXXXXXDVVMTQSPSSLSASVGDRVTITCQASQDISNYLNWYQQKPGKAPKLLIYDASNLETGVPSRFSGSGSGTDFTFTISSLQPEDIATYYCQQYDNLPPTFGGGTKLTVLG

SEQ ID NO: 1021 - protein, 243 aa, Artificial Sequence
  illustrative antigen binding domain 2
  Relationship to another sequence: Variation of SEQ ID NO: 278
  misc_feature (118)..(135): Xaa can be any naturally occurring amino acid
QVQLVQSGGGVVQPGGSLRVSCAASGVTLSDYGMHWVRQAPGKGLEWMAFIRNDGSDKYYADSVKGRFTISRDNSKKTVSLQMSSLRAEDTAVYYCAKNGESGPLDYWYFDLWGRGTXXXXXXXXXXXXXXXXXXDVVMTQSPSSLSASVGDRVTITCQASQDISNYLNWYQQKPGKAPKLLIYDASNLETGVPSRFSGSGSGTDFTFTISSLQPEDIATYYCQQYDNLPPTFGGGTKLTVLG

SEQ ID NO: 1022 - protein, 244 aa, Artificial Sequence
  illustrative antigen binding domain 2
  Relationship to another sequence: Variation of SEQ ID NO: 278
  misc_feature (118)..(136): Xaa can be any naturally occurring amino acid
QVQLVQSGGGVVQPGGSLRVSCAASGVTLSDYGMHWVRQAPGKGLEWMAFIRNDGSDKYYADSVKGRFTISRDNSKKTVSLQMSSLRAEDTAVYYCAKNGESGPLDYWYFDLWGRGTXXXXXXXXXXXXXXXXXXXDVVMTQSPSSLSASVGDRVTITCQASQDISNYLNWYQQKPGKAPKLLIYDASNLETGVPSRFSGSGSGTDFTFTISSLQPEDIATYYCQQYDNLPPTFGGGTKLTVLG

SEQ ID NO: 1023 - protein, 245 aa, Artificial Sequence
  illustrative antigen binding domain 2
  Relationship to another sequence: Variation of SEQ ID NO: 278
  misc_feature (118)..(137): Xaa can be any naturally occurring amino acid
QVQLVQSGGGVVQPGGSLRVSCAASGVTLSDYGMHWVRQAPGKGLEWMAFIRNDGSDKYYADSVKGRFTISRDNSKKTVSLQMSSLRAEDTAVYYCAKNGESGPLDYWYFDLWGRGTXXXXXXXXXXXXXXXXXXXXDVVMTQSPSSLSASVGDRVTITCQASQDISNYLNWYQQKPGKAPKLLIYDASNLETGVPSRFSGSGSGTDFTFTISSLQPEDIATYYCQQYDNLPPTFGGGTKLTVLG

SEQ ID NO: 1024 - protein, 246 aa, Artificial Sequence
  illustrative antigen binding domain 2
  Relationship to another sequence: Variation of SEQ ID NO: 278
  misc_feature (118)..(138): Xaa can be any naturally occurring amino acid
QVQLVQSGGGVVQPGGSLRVSCAASGVTLSDYGMHWVRQAPGKGLEWMAFIRNDGSDKYYADSVKGRFTISRDNSKKTVSLQMSSLRAEDTAVYYCAKNGESGPLDYWYFDLWGRGTXXXXXXXXXXXXXXXXXXXXXDVVMTQSPSSLSASVGDRVTITCQASQDISNYLNWYQQKPGKAPKLLIYDASNLETGVPSRFSGSGSGTDFTFTISSLQPEDIATYYCQQYDNLPPTFGGGTKLTVLG

SEQ ID NO: 1025 - protein, 247 aa, Artificial Sequence
  illustrative antigen binding domain 2
  Relationship to another sequence: Variation of SEQ ID NO: 278
  misc_feature (118)..(139): Xaa can be any naturally occurring amino acid
QVQLVQSGGGVVQPGGSLRVSCAASGVTLSDYGMHWVRQAPGKGLEWMAFIRNDGSDKYYADSVKGRFTISRDNSKKTVSLQMSSLRAEDTAVYYCAKNGESGPLDYWYFDLWGRGTXXXXXXXXXXXXXXXXXXXXXXDVVMTQSPSSLSASVGDRVTITCQASQDISNYLNWYQQKPGKAPKLLIYDASNLETGVPSRFSGSGSGTDFTFTISSLQPEDIATYYCQQYDNLPPTFGGGTKLTVLG

SEQ ID NO: 1026 - protein, 248 aa, Artificial Sequence
  illustrative antigen binding domain 2
  Relationship to another sequence: Variation of SEQ ID NO: 278
  misc_feature (118)..(140): Xaa can be any naturally occurring amino acid
QVQLVQSGGGVVQPGGSLRVSCAASGVTLSDYGMHWVRQAPGKGLEWMAFIRNDGSDKYYADSVKGRFTISRDNSKKTVSLQMSSLRAEDTAVYYCAKNGESGPLDYWYFDLWGRGTXXXXXXXXXXXXXXXXXXXXXXXDVVMTQSPSSLSASVGDRVTITCQASQDISNYLNWYQQKPGKAPKLLIYDASNLETGVPSRFSGSGSGTDFTFTISSLQPEDIATYYCQQYDNLPPTFGGGTKLTVLG

SEQ ID NO: 1027 - protein, 249 aa, Artificial Sequence
  illustrative antigen binding domain 2
  Relationship to another sequence: Variation of SEQ ID NO: 278
  misc_feature (118)..(141): Xaa can be any naturally occurring amino acid
QVQLVQSGGGVVQPGGSLRVSCAASGVTLSDYGMHWVRQAPGKGLEWMAFIRNDGSDKYYADSVKGRFTISRDNSKKTVSLQMSSLRAEDTAVYYCAKNGESGPLDYWYFDLWGRGTXXXXXXXXXXXXXXXXXXXXXXXXDVVMTQSPSSLSASVGDRVTITCQASQDISNYLNWYQQKPGKAPKLLIYDASNLETGVPSRFSGSGSGTDFTFTISSLQPEDIATYYCQQYDNLPPTFGGGTKLTVLG

SEQ ID NO: 1028 - protein, 250 aa, Artificial Sequence
  illustrative antigen binding domain 2
  Relationship to another sequence: Variation of SEQ ID NO: 278
  misc_feature (118)..(142): Xaa can be any naturally occurring amino acid
QVQLVQSGGGVVQPGGSLRVSCAASGVTLSDYGMHWVRQAPGKGLEWMAFIRNDGSDKYYADSVKGRFTISRDNSKKTVSLQMSSLRAEDTAVYYCAKNGESGPLDYWYFDLWGRGTXXXXXXXXXXXXXXXXXXXXXXXXXDVVMTQSPSSLSASVGDRVTITCQASQDISNYLNWYQQKPGKAPKLLIYDASNLETGVPSRFSGSGSGTDFTFTISSLQPEDIATYYCQQYDNLPPTFGGGTKLTVLG

SEQ ID NO: 1029 - protein, 251 aa, Artificial Sequence
  illustrative antigen binding domain 2
  Relationship to another sequence: Variation of SEQ ID NO: 278
  misc_feature (118)..(143): Xaa can be any naturally occurring amino acid
QVQLVQSGGGVVQPGGSLRVSCAASGVTLSDYGMHWVRQAPGKGLEWMAFIRNDGSDKYYADSVKGRFTISRDNSKKTVSLQMSSLRAEDTAVYYCAKNGESGPLDYWYFDLWGRGTXXXXXXXXXXXXXXXXXXXXXXXXXXDVVMTQSPSSLSASVGDRVTITCQASQDISNYLNWYQQKPGKAPKLLIYDASNLETGVPSRFSGSGSGTDFTFTISSLQPEDIATYYCQQYDNLPPTFGGGTKLTVLG

SEQ ID NO: 1030 - protein, 252 aa, Artificial Sequence
  illustrative antigen binding domain 2
  Relationship to another sequence: Variation of SEQ ID NO: 278
  misc_feature (118)..(144): Xaa can be any naturally occurring amino acid
QVQLVQSGGGVVQPGGSLRVSCAASGVTLSDYGMHWVRQAPGKGLEWMAFIRNDGSDKYYADSVKGRFTISRDNSKKTVSLQMSSLRAEDTAVYYCAKNGESGPLDYWYFDLWGRGTXXXXXXXXXXXXXXXXXXXXXXXXXXXDVVMTQSPSSLSASVGDRVTITCQASQDISNYLNWYQQKPGKAPKLLIYDASNLETGVPSRFSGSGSGTDFTFTISSLQPEDIATYYCQQYDNLPPTFGGGTKLTVLG

SEQ ID NO: 1031 - protein, 253 aa, Artificial Sequence
  illustrative antigen binding domain 2
  Relationship to another sequence: Variation of SEQ ID NO: 278
  misc_feature (118)..(145): Xaa can be any naturally occurring amino acid
QVQLVQSGGGVVQPGGSLRVSCAASGVTLSDYGMHWVRQAPGKGLEWMAFIRNDGSDKYYADSVKGRFTISRDNSKKTVSLQMSSLRAEDTAVYYCAKNGESGPLDYWYFDLWGRGTXXXXXXXXXXXXXXXXXXXXXXXXXXXXDVVMTQSPSSLSASVGDRVTITCQASQDISNYLNWYQQKPGKAPKLLIYDASNLETGVPSRFSGSGSGTDFTFTISSLQPEDIATYYCQQYDNLPPTFGGGTKLTVLG

SEQ ID NO: 1032 - protein, 254 aa, Artificial Sequence
  illustrative antigen binding domain 2
  Relationship to another sequence: Variation of SEQ ID NO: 278
  misc_feature (118)..(146): Xaa can be any naturally occurring amino acid
QVQLVQSGGGVVQPGGSLRVSCAASGVTLSDYGMHWVRQAPGKGLEWMAFIRNDGSDKYYADSVKGRFTISRDNSKKTVSLQMSSLRAEDTAVYYCAKNGESGPLDYWYFDLWGRGTXXXXXXXXXXXXXXXXXXXXXXXXXXXXXDVVMTQSPSSLSASVGDRVTITCQASQDISNYLNWYQQKPGKAPKLLIYDASNLETGVPSRFSGSGSGTDFTFTISSLQPEDIATYYCQQYDNLPPTFGGGTKLTVLG

SEQ ID NO: 1033 - protein, 255 aa, Artificial Sequence
  illustrative antigen binding domain 2
  Relationship to another sequence: Variation of SEQ ID NO: 278
  misc_feature (118)..(147): Xaa can be any naturally occurring amino acid
QVQLVQSGGGVVQPGGSLRVSCAASGVTLSDYGMHWVRQAPGKGLEWMAFIRNDGSDKYYADSVKGRFTISRDNSKKTVSLQMSSLRAEDTAVYYCAKNGESGPLDYWYFDLWGRGTXXXXXXXXXXXXXXXXXXXXXXXXXXXXXXDVVMTQSPSSLSASVGDRVTITCQASQDISNYLNWYQQKPGKAPKLLIYDASNLETGVPSRFSGSGSGTDFTFTISSLQPEDIATYYCQQYDNLPPTFGGGTKLTVLG
